United States Patent Application Publication US 2002/0061521 A1 - sequence listing, part 2

SEQ ID NO: 1953 - DNA, 32176 bp, Homo sapiens
gcgggtaaacagacatggccggcgaaggagatcagcaggacgctgcgcacaacatgggcaaccacctgccgctcctgcctggtaaccgcccggagtagttccctgtagtcgggagtggggcgaggctcggagccgctagcggtgcagctgggcctgggaggcgggcgtgggggcgccaagcctggcgagccagcccagcagggccgcaccggaaagctgcttcacgtcggccctcggccagcgatggagtcgcggcgctttcttcgctgctctgttgccccgagccgtgagccagggtgtcggggggagcatttgctattaagaacaggaaacccatcctctccatcctccttgtgttctgagtttagctcctaggaaatgctctgaaactagaggaccgggtcagattcacagcggttacttttgctggtctccttccttttaataagagtgacagctaacatgtactaagcacttaccatgttacgagccgtgcagttaacgctttgcatgcatgtcgccttttaatccttcccacatcagttttcagtttccgatttgataagcgagtattggatttgcagattagttcaatgacttgcccaaggtcacacagcagagtcaggattccaacccgggtgtgtctgtcattatatctctaaaccacttctctgttttgtttttcttactatcggtctttctcaggcatgtacgattatgcttaatcagagatacttagtttttctttttcgtgtatgttgtgtgaaatgtttagactttggccttgtgttgaaatactgaacaaaaaaaaaaaggcatggaatattgcataaacttttcatggaatgcctttcaagagatgctttccaaaaggtgtatcatccaaacttgaaagtgttacttgagtcccttcgttatatgacaagtatgttaggtgttgtggagatgaaacgagaggtaatacacaatctgataattgaggtttactgtctaggcggggctgctgagaatataactaaacgtaaatcaactgcagaggcggttgatttagggccagataaatgaatgctgttgtggctcttcagaggcagaggttgtttaagggtcagaggatttgggaaaaagcctttcaggtagatcaggagacatctaaaagcacatatttaggatatggttgtgggacataaggcctaggaggtatattgggtctaagttgctgggaaactggcatctcttgccagtgggtttgggtttttcctgtggattgccaagaaacagttttaggtttcaggtaattgcctaaagaaatctatgcttggaagattaatttgtccactggtagcagcatggattaaaagaggaagagactgagtgcgtgcccaccatataggagagaacttttctgtaaaaataaaccatagtcactggttgttctcgaagccattctagctgagttgacacaagggtaagtgtgccagcctttgatggaaagctgagctattttttcagagacattagccctactctctgtgccaaatccggtgtttcagggagaatggtgaatagaagagggaggatactgatcttctgtcgacattcacatcgtgcctctgcatgagatgagtcatcagacttcactgatagctctgaacagtcagcgtggttttttgtttgttttttttttgtttgttttgttttgttttttgtttttcagaaaagcgtcgggagagggcccagagatggtgtagatatagcaataatgcctctccaaattacgtaaattttatttgtagggaaacactgggctttccataattccatgtagtacgagttgttctgaagagtaaatcctctaagttccaacaaaaagctttatatttgagatgtgaagagtttatcctaggcaaatgaaacattaataaacataactgagtaggggaaagtggtttttagccatatttatgaaaaaaaggttactaaagaaattatttagagactaggagtcagaacagttaaaatgtaaatttttaacaatattaattccagcctttgagctaatagtttatcttttaaactttctgtagtagagcaataaagtgggttgtgctgcatgccaagtgatagccatactgtcagagttggaaatacaaacaatttgatgcagaatatttttgtcatccatttagatagctctttttttatctcagtgaaacttacatgttccaaggaaaatttgtatgaagtgttagaccattggctatttacatataagttgaagtaattctgtttttgacaaagttttatatctaggaagttgtaataataaatagaaagtccaaggcagttaccatattgaaaatcatttttattttctgtcaggggcctggctagaggtggtttgacttaaataatgatatgcaaaggaaaacaaatgattatttcgtaatgacattttatcgatttagaagtttatttggggcatttaaaaatacatgaactgggaggtgagaaatgagattcagtaattctttattgttagtctaggccagggtctcccaacctcagcactggacttttgggctggagaattctttgggtgggattgtctcgtgcattgtaggatatttagctgcatccctggcctctacccactagatgccagtaggactcccttagttattgcaaccaatatcccctgaggggcaaaatcacctgtggttgagagtcactggtctaggataggaaatttactcatagtttgtatgaaaaggacagactcacagttagtacaatagcatatgtattgtgtagcgttttctaattttctttgctgtcattggtaacatctggttttctaagacattcttttaaaatgttttatgcttcatgcaaactttatttttaaatttaaaattaagcaaaatagtatgcaaatgattgcaaaattttctttgtttctttcttttgagatggagtcttgctctgtcgcccaggctggagtgcaatagcacaatctcagctcactgcaacctccacctcctgggttcaagcgattctcctgcctcagcctccccagtagctgggattacaggcacctacaaccacacccggctaacttttgtgtttttagtagagatggggttgcaacatgttggccaggctggtcttgaactcctgacctcaagtgatctgcctgcctcgtcctcccaaagtgctgggattacaggtgtgagccaccacacctggccttcattttaagataatgtagcgactgccagggaaatgttgtcactagaaaaatgctgtgaaattcttcctgctaggttatctttctctcagttttaattaacagatcttgcctgctttgtttcttttcttacttatgtaggaactgattgaagttgagagtttgagagaacgttagaggttgacttgttgaagcctatcattttgcagatgaggaaactaaaatttaattgggcagaatgagttgtctaaggtgttaaaattagttactggtgagggagaagagaaaaatctcccatatagaagaattttaaataacttacatttcctcttcaagggagtggagcataactcatcacccctgaagtggaggctacacctagtgatttgcttccgaagggtacaatgtgaaaaggaggggggaaaggaactttacagcggaaaaacctgacacacactgctgtagccaggtgatcaaggttaacagcaggaatagttcataatatataggctggatatgtaataaaaacagcacattggcaacagaccccatttctaaaaaggaaaagaataacaacacttcacttctgtggtcttcctccctaaaacacgtatcctcagtctaatcatgggaattacatcaaacaaaacccagttgagggatactctacaaaaggcctgaccagtactcctcaaaactcagaaacaagcaaagtctgaaaacccccctagcccagaggagggtagggggacctgataactaaatgtaaagtgggatcctggaacgcaaaaagactagataaaaactaagggaatccatttaaaatatgaagcttagttagagtaatgtaccaagactgattccttcgttgtggcaaatgtaccatactaatataaattaactataggggaaaaggatgtgtgacacacgggagcattctgtactatctttacacttctctgtaaatgttaaactattctaaaattcacagttgacttaaaaaaaaaaaatagctactgacagagcccagcacggaccccagtcctctggctccctcttcacggtgctgtagagtttaccaaatgcatgtggttttagaagtacccctcttttgaagaaggaattacatgtttgaaaggttttcattcatctttttttttttcttacaatattctacttttatagcagagagtgaggaagaagatgaaatggaagttgaagaccaggatagtaaagaagccaaaaaaccaaacatcataaattttgacaccagtctgccgacatcacatacagtatgtaatttagtgacagatctaatataatagatatacatttaaatgtagataaaagttcataaaaacaagtgactgatatttgtattactagatatcagaaattgtggatgaggacatgtagtcctcatttgccagtagataaacatttaactgtaatttttaagaagcttaatactatgttgtggtagaattgtttgaggaattgttgctctttatactctttctggtaattgagctattaaatacttctctgtacttctaggtactagagtgttattgaacatactaacattttatacttactgtttgtgatatgtgggcatagagatatttcttggtaaaaataatactttgtactaaaaaaattcttgaatttctgtgtttgtgatatattcataaaagattagaaattcttctaagagttaaagttagattaaaaattatattttaacatgggatgcttatataccacgtttattaagtgtttgtaaccccatttgtatttttttctttttttttgagacagagtgttgctctgtcgcccaagctcgagtgagtgcagtggcacaatctcagctcactgcagcctccaccttccaggttcaagtgattcccctgcctcagcctcccgattagctgggattacaggtgtccaccaccacacctggctaatttttgtatttttagtagcaacagggttccaccatgttggccaggttggtcttgaactcctgacctcaggtgatccgcctacctcggcctcccaaagtgctggaattacaggtgtgagccactgtgcccggcctgtatttcttttaatgtgatttgctctttagtctgttgagcttacatttttattacatatcgatcatgacactatacctatatatgtttttatatagtacctaggtgctgatatggaagaatttcatggcaggactttgcacgatgacgacagctgtcaggtgattccagttcttccacaagtgatgatgatcctgattcccggacagacattacctcttcagctttttcaccctcaagaagtcagtatggtgcggaatttaattcagaaagatagaacctttgctgttcttgcatacaggtaaaatattagagtccatttgcttaatacattccctctcatgggtaattgcagtggtcagtgttgaagccaaagcaggctgttatttcgcatgtacaggagaggttgggtaagaatgtgaggttaggaatttggttaagtagaagtttgatagtgcaagttggagtatttttgttcatttcattaccatctaactcagctcttcaccttcatacacaatttaactttctggtatttgaaaaatttttaatcatttatatttgatgaaaaacatttctggaatcttagtttcaataactgtcttcattatagagaagtagtgcttttttattttaacgtaaaggattacttttccaaaagagtggtcttttctttccctctctctcaaaattcataggttgtaccactttaaattgaagctgaattttaagtatcccatggcaaataaaggaaatctgcggtagaggcaggaaatacatacaggaagctcccaccccagtacagtgctgccagtaagcagcagaaatgataagtcatttgacagagtgaaagaatgtttggtttgggaaatgagtttaaacccctgtaagttctaaattattttcagtgactagaaatctattattttcctaaagttctctaattgtacttcctgagtccttcttgtatatcccccatgtgatttaaaaataaataaaattggccgggcatggtagctcacgcctatactcccagcactttgggaggccgaggcgggtggatcacctgaggtcgggagtttgagaccagcctgaccaacatggtgaaaccccgtctctactaaaaatacaaaaattagccaggcgtggtggtatgtgcctgtaatcccagctactcaggcagctggggcaggagaatcacttgaacctgggaggcagaggctgcagcaagccgagctcatgccactgctctctagtctgggcaacgcagcgagactccatctcaaacaaataaataaataaataaaattatcctagctttgtagtaagggttgattctataaattgtttacctgtatttattgctttgcctactttgcatatatttaaaactcaaatgttcaaaattctttccttttaaaattttcttggaagcaatgtacaggaaagggaagcacagtttggaacaacagcagagatatatgcctatcgagaagaacaggattttggaattgagatagtgaaagtgaaagcaattggaagacaaaggttcaaagtccttgagctaagaacacagtcagatgggtaagaaataacatataccttaatgctctttgaatgtttcctaatgaaatagttttcttgtactttttctgttctactgagccttcatattttgtaacttttaactagttgttctctttcccttctaaggtatagcccagtggtttccaaccttgctatgcatcagaatcacctgggaagcttttaaaactatagaagcttgagttccaacctcatctcccatctccagagagtgatgaggctgcagcatcttttaaaaatgattttcaggtgattctaatgtctctccaggtttgagaacaatcatgtaaatccaaagggaagtgttgtttgggatttggcttctttaggattgaaggcctctcggagcataagaggatagggagaccagaggcttgtgagctgttcgtgtgctcaccaggacagctgtggtttttgtagcattgctatgatgtttgaaagccacactggttacatctgcctactgctccagctgagctataaaagccatttatatttcgtgtccctctccagtgtgaattttatatcacccagaaatgctatttacataataaatgatcaataaatacttgtagtctatgtgccttgtgacatttagaaattccctgagtatactgtttcagcagtaattcattttgacaaagctgtcatggctgggttttgcacaaattcaagggatacacattaaaacagacacaaaaaagtccagtttattttatcctcttttaaaaaggaaacaaagcatttgccttgatcactggatattacctcttaacggagtgcttctaaactgtggcatcacccgtgaggtctcacagatacacagtcctggtacgcaatacaagtactagtgaattggtttccaatttatacccacagttgaaaatctcatcagacctctgtgttgcccaggtggtatcttctgaacacatgcaagttctgagtattttggggtttttttgggcggggtgggggattaagactgaaaaaacaatgtgagcagcatgagggcaggaacgttttgtctgttttgttcacatggtgggcgttcctatatatttttgaattatgaaaatattgacatgtcaggtagctccttggagctaaagagagcatagaggcatgtgagatgggattgccagagctcttagggtgtttagttctccccaggtacttttccagaacattcactgtgcaaactttgatagccttaccacattgcactgtcctgacaggattttatgtacgtctccctcaatagataagctgcttgagaacaatgaccaagacttatttatgttttacatttaggaccataaattttatataaatgaatgaaagaatgatctcctggggcgggtgggggtggtctgcattatgataattagcaaactgttttgttactgtggattttgctaacagttccatttttaaagtacttcttatcttcatacaattttgattatttgtgaatacttttatagaaatcattaaggaaaattgacttggggaaaagtatatttctcagactgtcttgacattagtgacttttgattgtggaaaaactattgaacacaagatggcagtataccgttaactctgaaaacaagacaaggaatggatttttgactctagtaaagattaacatcaggccgcgcacagtggctcatgcctgtaatcccagtattttgggaggccaaggcaggacgatcacctgagctcacgagtttgagatcagcctgaccaacatggagaaaccccatctctactaaaaatacaaagttagccgggcatggtggcgcatgactgtaatcccagctactagggaggctgaggcaggagaatcgcttgaacccgggaggcagaggttgtggtgagccaagatggcaccactgcactccagcctgggcaacaagaggaaaactccatctcaaaggaaaaaaaagattaacatcaaactgatacaggtggacaagacttggaaagggcacattctctctagtattctgtagacccattattaaggcctctcataagggtatgtctgtcttcatttaaaaggcctctgtggaatgagatttctcttggctccactacttctctggccctgtaaccaccttcactggaaatggtgaaatgaaagaaattctggagttgatttagttcagtctcgtctttttctgtatcagaatgccaggtactagagaggttaagtaatttgcttaaacagcaaataagcgacagacctgattggttctaggtcccatgacttccaaactggtactccttccattataccagaatttctctataacacatttgaaactcaagccagcttccctttctccagtaaaatatttaatattcatttgtttttcttagagaaataagcatatagaaaaataaaaattaaaaaatataaatatccatcttttacctaaatgacacttcatttattaaaagtacactacagaggccaggtgtggtgactcatacctgtaatttcagccctctggaaggccaaggtatgtgaatcatttaaggccagcagttcaagaccagcttggccaacatggtgaagctgcatcactactaaaaatacaagaaattagctgggcatggtggcctgtgcctgtaattccagctgttcgggaggctgaggcatgagaaccacttgaacctgggaggcagaggttgcactgagcagagattataccgctgcactccagcttcgccaacagtgagactccatctcaaaaaagaaaaaaagtatacaacccccaaagtcatgagtgtgtgtgggttggggagggcggagcgggggtgggcatcttctgaacacatagaaattttttttttaataaaaacaggtctcactgacatacgactcttcagaagttcctacttcttagcatgtagagagggggaggggattgatatcctattggcatcacaagagaagatctcatacctgtctagactgagaccaataattgttagtcaaaaagttagctgaagctggaaatcacaaaatgttacacatatatagcttaaacattttattttaactttataaattcattcatttttcatctggagagaccaaggtctttccattgaagcagttctgcagattggagatgactgtagactttctggcactttcattgtacattatccacagtttatactgctagtttttctttaaagagggattctaaagatagtcacaaggcaatttgagtgcagaatttttccagatttgtgcggtttttttcctactattagagtagtctgtacctaatttgaaagcagtttatgtctcaacttaatgttccttgaagcagttttattgttgaagtcatatttcactggtttttataacatttatataaattatgttgctgtaatcacaaaacaactgtgataaacaagttggaaagaaaaaaaactagcttatgttaaaaacaaaactcagctgctgggagaagaaccagccactgcatatgcagtggaccctggccatgtttaaccaggtaaaggagagcattccttaatccttcaaggcaattcagacagtttgtactgcagactaattaacatgatctgtaagccaggggatcaataatgttactgtttttatcataatcaaatcttatacaatagttgggtaaagcatagttcttaattcagttacctataaccttgaagaatcagatttctaaaaatttctataggatggtatatacttttaccttcataatgtaattaacaagttatttgtgttcatgaatcaggtgaagaaaattgagattttgtttctaatgagctctaataataatataagaacacttgaccataatttgactatagtaaaattttttaacattttccgaagtcatgtagacaaattttctgagtatttctaatgagtttgcaggaaggaaataaagttagtagagtgagtctactattatcattaaattaaacttagatactttctaacacactcagttatttttccttctaataaataagtaaaatgtcagaatttcatccataatatcttgtggtcaaacagtggttattatgaaagactactttagaagtcttaagtataactaataaagcagagacttttaatatatttgactttgtcagtctgacagtgttatatactagcatttgaatatagttacatattctacatttcagaagctacactctaagagatagaatgcctcacaggaagatagctcatagatacaaccttcctgtttgcactagttcatgataagatgtttgcaattatgatattctcaagtagcattttggaaatgactttattatgacattttaaataacttttaagaaaaaatctaatttatagtttgatcctttgtacagttaaactcttaagaacgtgaaaaggaatgcacacagaaaggttgcatgtaactctctagtgttattttaattcatccatgtaaatgcattcttgatttttctcttcctttctctacttagattagatgacttatgagaaaggatagatgtaagagttaagcagcataagaagtggggggatagaagaatttgggtgtcttaagaatgtttaagaaagtagaagtatcaagcagtagttggttgtatgttggtttttttaaaactttgtttcatttatagactctgtatttatctgaaatgtgtagatctccctttccattccacagtgacattgaagatccgtaccttaggttatctttggttttaactttggtatgatttatgaaataaaattattttctgaaagtttctgtatcttaacatcagtatttgatgaatatgtttaaaagataaaacttggaaaatcttggtatttaaaattatcactgtttagaaacttatagttttgagttagtcaatcttagaaatgaataccatgcttggttctctttattttagaatccagcaagctaaagtgcaaattcttcccgaatgtgtgttgccttcaaccatgtctgcagttcaattagaatccctcaataagtgccagatatttccttcaaaacctgtctcaagagaagaccaatgttcatataaatggtggcagaaataccagaaggtgagaaactaattttttatgcatcttcaaaaaatgaagacaggttgttttttttcctgttttaagaaagaaacacaactttcatgattcattacccagccaccttgtatggcaatattccagctacatttgatcctctaaaaattgcacaggcagctactttatgtaaaagcagtttacaaaagcaataaaatgtcacacagctgtaaggtatccttgttattatgcttatcagctatattaatcgcttttgatttttaattccatgggaaatgcttattaaactatgatcaaattagatgttcggctcttgagttataaacatccattatcttaaagaagggaggattcttttggggtagagtagtagtagagaagtagagtctgttttccttcttccaaaccagagagaaaggtttcttttgctatgtgttttaatgaaatacagttgacatcgcagaaattgacttgagactaggtgctctttaaaaatgttgcttgtttgggcactaattcctatgttatatcctttgactaaatcataattgtcatagggaaaaaaaattgagggagcctgtttctactcgtttgtgagatgtgcaattttaagtatagttaatatttataattgctacctaaagaaaaagattactagtttctaaatttagaataattgggctttttgagtttttttttttaatatggaaagacagtttccactgtaaccttaaaaattctctattaatcattcctttgttgagtggtgaggatttaatattttaatgtaaatacagaatcctaatttaatgtaaattattatggataattaatgaagtggacttatatactagtcactgtaccgaatttttattgttcttgcagtagaattcctccagttttcagcgaaaacttgtgcagaatgggcacttgatgggcatcagggttataaccaggtatctataagacttcctggtctttatctcagttaactgatctgtttcatggtacagtgtgttttgactagtgtttctaaggaagattctaataaggaagatataattagactgctttaagactcccaaacaaccttgaaactagtattttttaacgtttagtaatattgatactgcctttagttaacaggcagcttttgtgtagctgtattagtccattttcacgctgccgataaagacataaccaagactgagcaatttacaaaaaaagaggtttattggacttaaagttccacatggctggggaggcctcacaatcatggcagaaggttgaaagtcaaggaagagcaagtcacgtcttacatagatggcagcagggaaaaagaacttgtacaggaaaactcccatttttaaaaccatcagatctcatgagactcattcactatcacaagaacagcacaggaaagacctgcccccataattcagtcacctcccactgagttcctcccatgacatgtgggaattgtgggagttacaattcaagatgagatttgagtggggacacagccagatcatatcaccgtgcaatactttcttccccataccagatgcagacactttaaatacatgtttacccttgtttcttttaactgaactgtgagaaattttgctcccatagtcattttaaatgttactgttgaaataagtatgtcagtgatcactgtcagtatgtggcccccaaggagtagatttggaatatattaagtcatttagtgcctaaaagtatgtttggcactggtttgctactgaaatacgtggcaaggtaactgcatcaagttgttccctatgtgtcatctgaatattcacgtagtgatgtatttcatactagagattttttttcagggggtacaggcataccacggagatattgcaggttcagtttcaaactgctgcaataaaacaagtatcacaataaagttagtctcatgagttttttggtttcccactgcatataaaagttttattcacacaatactgtagtctatcatgtgtacaataagattctatctaaaaaacagtgtacataccttaaataaaaaaatactttattgctaaaaaatacaagcatctgagccttcagtgaatcataatcttttttgctggtggatagtcttgttttgctgttgatggctgctgactaatcagggtagtggttgctgaaggttggggtgactacagcaatttcttaagacagcaatgaagtttgccccacagattgactcttcctttcacaaaagatccctctttagcatgcggcgctgtttgatagcatttaagccacaacagaactttcaaaattggagtcagtcctgtcagaacttgctgctgctttatcaactaagtttatgtaatattctgaattctttgtgtcatttcaacattcacaacatcttcagcagtagatttcttctcaagaaaccactttatttgctcatccataagaagcaactcctaatccatgtttgatcatgagatcacagcaattcagtcctatctgtgggttccacttctaactttagttctctttttgtttctgtcacatctgcagttacttaactgaaggcttgaaaccctcaaaatcgtcatccatgagggttggagtaaacttcttctaaattcctgttaaggttgatattttcaccacctcccatgaatcatgattattcttaatggcacctagaatggtgactctttttcagaaggttttcaatttactttttccagatccatcagaggaatcactatctgtggcagctatagcctatgaaaaatgtatttcttaaataataagatttgaaagtttaaattactccttgatccatgggtcacagaatggaaattttgttaccaagcatgaaaacagcattaatctccttgtatgtctcccatcaaaacttctgggtgaccatgtacattgtcaatgagcagtaataattataaagagtcttttctgagcagtaggtctcaacagcaggcttaaaatattcagtaaaccattatctaaacagatgttctgtcatccggactttgttccatttactacagagcacaggcagagtagatttagcattcttaaagggccctaggatttttggaatggccagtgagcattggctttaacttaaagtcaccagctattagcccctgaaaggagacttagggactttctctggattaggctttggctcaacggaaatttgtggctggtttgatcttctgtccagaccattaaaactttctccatatcagtaataagactttttggctttcaccagagtagcatttcatattcacagctttgctgtttgccccaggaggcctagcgtttggcctctttcagctttgacatgtgtttctaactaagctttatcatttttagcttttgatttaaagtgagagatgcttgactactcttcttttcacttgagcacttagaagccattgtaaagttattaattagcctagtttcaatattgttgtgtctcaaagaaatagggaagcctgaggagagggagagagatggaggggctcgtcagtggagcaatcaaaacacatttgttaagtttactgtcttaaatgggtgcagtttgtggtgccccaaaacagttacagtaataacatcaaagttcactaatcacaaatcatcataacagatataacaatgaaaaagtgtgaaatattgtgagaattaccaaaatatggcacaggcaggtagttagcacatgctgttggaaaaatggcttgatagacttgcttgaaacagggttgccagaaatcttcaattttttttttgtttgtttgtttttaaaggcagtatctgtgaatcacagtatgcctgtattaagtatttgggtatatagaatagttcttcggcaccaagatggcttaaaaattcttaaccattaaaaatcctaaattaacgcttctttgcaaagttctaagtatagagtgagagcagtggtagttaattcctgactcaagtgctctgtacagctagttctgtgacctgcctgtaggatcctgcagtcttaaacctgaacttgggctaagcaagtaagactgctttttaaatttattttttatgtgagttactacttaaattcttcctgttctatggttaaagcatcttgtttacattacattccgaatttggcccatgcaactgggttgccactggcttaataagacaagaaaagatagagctgggaagaccaaagaagcacatatttgcctgggttcagatcctctgaatttttcctcttgtcttaattagcccttggttattttcatattcagagttgccaagggctaaagagacgatgctaaggaatgagaaggcctaaaaggttttaggtgatacaaataactccatcccatatacgtcaggttatctacagggttcccttgcttaaacattgatagagtttcttaggttctgaaatttggaatctagatcactaggccaagagaaaccgctagctgatctattttggactccaggtgacctacaaactctgttctgctttagagagaccacttagagccattctgtgtgcatcaaaaaggaatctaacagggaaaggggatggcagatatctttggtgggaactccgtatgcagtgggaccatctgagtggtttggcatgctgcacctttagtgggacgctagcttaccatgagggctggattatgtaacagtgtttgtctttagacagatacaaggttcagttcattcctgtcttcatagagcttgcttgtatctgatttgtccatcccaccataatctgaagtactgcatatgtgtcttctgtctctgtgtctgagtagtagttaaaatggtcagagttgggagatgcttacataactaagctaactcaagctaataaggttgccgcgcacttttcctgcagaaaaggaacttaaagtatcgaggattgtagtcttcctgagatatattcaattaactttgaaactgcacacagcatttgccgtggaaacctaaacaactcaaatgacatgaaataaaattatttaagcttctggaagtgttctgtgttatctaccattctgacaaggaagcattagagaagattcagcacgtgtctctcatgattaaggagttaggccagtgtaattaggaaacactttcaaaacccactccatctagagacatttcttgttctggaatttgagctctgaaactgtttacttcttttcccatcacagtgcctttctctattcactggtttactgtagggggatttgagaatccccctacagtaaaaatcctcctcaaaaaaaaagaggaaattttgtttaaacctgtttggagtatgacttaaatgtttctaagtatattccctgcttgcccagaccatctgcttattcatatatcaaggcttactatgttaatcagaaaagagttgagtatgaaatgtaaagataagtcaaatgggaaacagatactaagaaagtaatgagtctcatctttctggcctctgttgaacttagccatggttgttcctgtttattgcgtagagcagggaggaactgagcatgaatttggaagggcaggggtctcatacgtaatctcccagattagtgtttaaatctcctcctaattttatctagatacaaatgttcttatttctttcttatacagaaggatacgtacctttttcttaacggtgtatcttataggagattcttttgtattagtttatagagcattgctcattcttaaagctgcttggaattcttttgtatggatacactgtataaccagtcccatactgatgatagatctgtactaaataacatgtacaaatgaccttttatataggtaaatatttatgataacttttaaagagtgaggttattggctcacagggtaaatgcatttataattctgtcagttttaaaaataattttgaggccaggcacagtggctcacgcctgtaatcccagcactttgggaggctgaggcgggtggatcacaaggtgaggagttcaagaccagcctggccaaaatggtgaaaccccgtctctactaaatatacaaaaattagccgggcatggtggcgggtgcctgtaatcccagctacttgggacgctgaggcaggagaatcactggaacccgggaggcgagttattttcaaaatacttaaggtgtttgtacttatttttattgtttcatcatggcctgacaggcaatgtagtatcaaacctgatgtttgctgatctgataagtgaaatatattacattgaaggttcaatttgaatttctctgagagcaagggtaagcattttgttgtaagagcagtttgtgtttcctttctgtaaagtgtttgcccatttttctacggcttgttgatttcttgggagttccttgtaagctttatagtctctgtaattaatgagttccaaacatttttcctagtttgtcttttgtcttttgtttttggtgtggtgtgtcaaacagaactgtttttttgttgttgttcttacatagtttaatttttaatgcttctgtattctaaatcatagccaaaaatgacgttcccatgcaaaggaatgtctcatgttttctttggatacttgctgtggtttcattacttttccgtggaaagctctgatccttgtgcagttgatcctgatataaattccactttacttttttccagatggctccctattgtcctactaccactttttgaatagtccatattttctcccattgatttgagatgccaccattgtcacagaccaaattcatatgtttattttacttttcttctcttttggtctgcttgtgtgccatcatcatattgttgttaatgttggcactttatactttgtgtaaataaaaatagggctggtaagcccctcactgcttttttgtcaagcttttcagtgactaccattgattaacatttccttgtgaacttgagaatctgtttcaccttgttccaggataataatcgtaagaacagtaacatttattgactatttttatataaagaagaaaagtcttgaaatcttaggctatgtatagtcaggtgcttcctcagaaagactggtcatttcccaggcatacatcttgtatgtacacttgtgtatctgccattagcgtataagcctcaggagtaggaaagagcttatcattccatcccagttcttattaccatgtaggaatttggttcatgaaagaaggaaacaaaaactggtaactttttaattatttatataaattatttctgtcatttacattgctgattgtaataggatttaacacaataagtgaccacttttagtcactatataaaggaagtcagtggtagtgatttactatttatgtttagcttttcacattactctttccattttcattgcacttcaaagactcacttaaatggagtttcacatgttttgaacattctacgttgttgggaggcaaagccgaagccatagttatgaggcttaagaatggaggactgtgatagattacctccaggtaacagattcgttttaagggcttttatgcctgctttcagtagtaaatcctgttcccagagtgaatactactctgctggagaatccgtcattggtcacttttaagtgcctaaactttttggctagtattaaaattttcttgaggtataaccattttatgacatcaatcatggtgttgatatatttaaagaatgcctataaattgctagaacttatcatccattttacccagatataagacaggagcctttcctattgtgccagaaagctaaatgggactcttaaatttgaggatgttgaaatgtcttaaactttggcagttgctctgtaaaagctagctagctaatctgttctggtatatgtctcttcagtgtgtctaattgactaacacacatcacaaatattaaggatgtattatgcatatttgaatctgtcaggatgctccagataaagaattttagaggtcttctgactctgaaaagaagctacctgaaactgtagcttgctcatgggcatggtggcagagtgaatgcctgatccagtgcattgctcttaatatgctagtgtgccacattttattctctttatacttgaaatttacatattatttcagattctttttcttgacatgggtgccaaatgaaattacacttttgtactacacttttttacatttcttttgtattacaaaagtgaccattctgatatgtgaagtatattttaataactgaatgaggagtgtgtcagcgaaactaaaactttcagttgggtctttgtcattttgtaattctaagaatatatagcttcttctctctaaaatataagctcgacagggtattgaattttgttggtttttctttcattcactggcatagcctaaatgtataaaaatagcctgacacatgttaggcactgtattagtctggtctcacgctgctaagacgtacccaagactgggtaatttataaagaaaagagttttatttgactcacagttcagcatggctagggaagccttaggaaacttaccatcatggcagaaggggaagcaaacatgttcttcttcacatgatggcaggaagaagtgccaagcaaaagggtcaaaaccgtcttaataaaaccatcagatctcgtgagaactcactatcatgagaaaaccatggcagtaactgtccccatgattcagttacctcccaccagatccctcccacgacacatggggattatgggaactacaattcaagatgagatttgggtggggacacggccaaaccctatcaggcactcacaatatttgttgaatgaatgatggttagagtcagactccctgtatacagatcctagctccttcctatttactgactctgtgaccttgagcaagttataccatccttgtgtgcctctgtttccttactttagaatggagataataaactactaaccttagagtattcttacaagaaatgtgaaattcttggcacaatactaatggttgccattgctgttcctgaagattcagagctacttgatgtgctcttggtagtattttcttaaattctgtaactggactgtgacaataatcttaccattaggtatttagtcttaaaagtgagggacaacttattggagagtacctgaagggtctcatggtctgactcctcaggctttaaccactaccagagcacacagtaggaggccatctcagatcacctttggcaggggtccccaaatcctggcccacgaaccagcactggtctgtggcctgttaggaaccgggacgcacagccggtggtgagtggtgaacgagcaagtgaagctgagcgccacctcttatcagatcagtggcagcatagattcttataggagcgcaaaccctattgtgaactgcgcatgggagggatctagactgcgtgctccttatgagaatctaatgataaatgtaatgcacttgaatcattccaaaaccatcctccaccccatctttggaaaaactgttttccacgagactggtccctggtgtcgaaaaggttggggacggctgatctttgcatagtctcaaatataaggattatattaagccagaaatgtttctcattaaggaatcctttgttttgagctgtaggtcgtgttttagaacaagtctgtcctcttccatattgcaactcctaaaatatttgaaaaccagtgtgtccacttgagagacagctctaaactgaacatctctggtaacaagacattccctttgataataaaagttcccatatttgaacagcatggaatagaataacattgtctcatagattctagtcttctgttaaaaccgcagttacttttgcaccaaactaacatagctagaataggattggagtggcggggaagtcgagggtgtgagtggtgtagcacattgtacagttgcgtagtacaattccagctgtcagctcagtcccgagtcccttttatgtgtgctgtgttcccacgtttcctgcagatcttactccggcacttgcaagatcatatgactaggtatgaaacatacctagggtaagtatcattcagcgtatgaaacatacctagtcatttgatattgcaggtgcaggagtagggtcttcctcttgttttgttaaatgttaccttgtttttcttgttctggtctgttaaaagtgccttttgatctaccttattccttttctctctcactttcatgtgtcatgtcacatgtcaattaacattttatttacagtgaaattacaaagatttgtacgtatgtaggttttgttttgagaaaaatgtgataattctttatattctgctataccttgttctttgatcacttgcagagcattccttgatataaacatattctaatgtatttcactctatttttgattgatgtttaggttgtttgcaatttgttgctattagcactgctgcagtgcatcccttcagtaatatttttgtgtcctatagaccatttgcttctctttcaaaaattttgtggttacttttgcagttatgtttccaaacgaactttaaattatacttataaattccattctcactggtattgcactgaatatgtaatttgaggactgacatcttaacagtattgagtctccccctcaaatactgaaattctacaatttctacaattcacatttctccccctcaaatactgaaattctacaatttctacaattcacaattcaactgaaatttctacaattcacatttttatatggacttaggcatgctcctgtttggatttcagttacaattagaggtgataaataatcggtttcccctctccttgagttttatgaaatgaggaacttcatcatgaagtctcaagtaaacgaacattttatctttcttgggattctatcacttcttaatgtttgcccttatagtgattcagctgattctcatttaaagtttttacacaaaaacagtttggattatatcttgaggttttcacttcagatactggacaagtaattagtataaaggcaactaacatggtcataatagaagtatggtgtttactctcaacatttatcttcccaaagttgtcttcagcattgaaattttaatgtttgacctttttaaataggaatgaagattctagttacaatatatatttgaaggatataggaagcatgatttcacacttcatagatagtcacgtcatgggattatctacaaaattttttatctttttaaaattagatgttttcctaggccaaaatcatttttcagatgttgctcattccagcattagaatctttattctgtggggttttttaagtgcctttttgttttgttttcagagaaagtttcattgtgcaaatctaacttcatggcctcgctggctgtattccttatatgatgctgtaagtaacttaccttaaatttactttatatatggtaggccatgtcataattaagggtcattaaaaaacaaaggtttagtttttccagtttctagtgccttataacttaagatatcgttaagagtggtggctcacacctgtaatcccagcactttgggaggccaaggcagggggattgcttgaagccaggcattcaagaccagcctgggcaacatggtgaaaccccatctctacaaatacaaaaattagccaggtttggtggcatgtggctgtagtcccagctgcttgagaggctgaggtggaaggattgattgagcctgggaggtcaaggctgccgtgagctgagattgtgtcactgtactccagcctggacaacagagcaagactgtctcaaaagggaaaaaaaaaggtatcacaagactctttagagttttattaagcatgtgaaattttgttgggttgggtgatagttacatttagaacattaaagcatccatattttactgttttggtttttctctaaacaagtatattaacttacgtctcttgatcattagtctattaattaatgcatccaggagggtttttgctccttaaagtttaacactaggcattgccacattttgcaaaactaagggacagtgctgaaatggtttaaagaatctggatttcagatcagagactgacttcagagtctgatttctgtcacttactctgtgggcctggagcaaattacttctccaaggacctatgaaatggatataatggtagctattgtacctggtgtgcatagcgggcattcaataaatgctagccatttcccttaatgaatcactgcccacaaatctggagtcctgggaaaactcaacaacatgcacgacactaaaggaaactgcagttgatctccgctctttagcagcttttcagcaattacaaagacacaatatatgagtttttgcatgttttgcatatgcttgtgaaaattatgtagtaaataggtgccaagtaaggtatgtagatagcaagtgctagtgcaatttataggtgccataatccctatggactgggtcagaaatggcctaatagaaggcagaagagaggccagttccaagcaggggcatagaacagaacaatctgcaagggagttgggagcatataccgctgggttaagacagtgagtgagaaaaggctggaaggcagacagtgctgggcaaaggagctggagcttgatcattgctgcatacgaaaatggaggcatttaaactgggactgagatgggactgagtgattaaattgctaccagtgttagttttaagagttgaaaagcttaatagtaaattttaataagcccatgaacttgattatggctacctttattttaaacaaggagaccttaatggacagaatcaagaaacagctacgtgaatgggatgaaaatctaaaagatgattctcttccttcaaatccaataggtatgaaaagttagtttcctgcctggagcctgggatgtcttgctataaaaaatagctttttcatggatgcgatccaatcatatcttctaggttttaagactgattaaaacattttaattctgaaaagcataatttcctttgagcagttgaaaaaaaatgagtattttaaaattaattgcaataaaatcctcatattctgtgagcactccaattttagacaagttttccataaaaagttcaaattgcaggaagtggctgtcatccaaaaacacttcctgtgtaaggactcctttccctgttcttcaaggtgcctttaaaagaagtgagtctagttccaggacttgccttaattatagatactctctttatctgtttataaggtatagtttagttatttttctagtctcttggcaaataacttctaacatggatttgagttcatgtttaacataaaaggattttaccaaaaaaagtataagaaaagcaattaaatttagagcttctgaaaagtgtatctttgacagctggtatatttttgtattgtttatacttgtataaaatgtgtaaccttaaagagaagggtttatttcaaaaggatattatccgatttgtaagttctctgatgcttatctgactcctaagtttaaaacttgaaaaaccatgtcttgaagatttttcttacagagtagctgcttgtcttcctattgatgatgtattgagaattcagctccttaaaattggcagtgctatccagcgacttcgctgtgaattagacattatgaataaagtgagtaaagtgaatatgtttttgatgcccatgttttattcaggctggagaactaggatgctctgttggggccaatggagctctgtatagagtccagtaatgtagtcatgcaattcagatttcaattgggatcttacaaacaaactcattgttttgtgtttgtcaaatatgaatacatttatcaacttagtgaaaaataacttgatttctgcatggaaatatccaaggttatatatcactattcctttactctagagaaggtcatttagttttatgtaaatatgtggcagatctcagtttcagtgactttcgtgctccatctttaaaagtgtttttgaatgcttggaaggaaaatgtgatattcagagagagcaatatctttataagtaagtttcttgatgatctatgtgattacatgataaagtgaatgccagtttttcctaccaataatttttctctcaaatcttttagtgtacttccctttgctgtaaacaatgtcaagaaacagaaataacaaccaaaaatgaaatattcaggtaaggtctttattacgtttttaatatacttgccttatcagaattataatgaagactgtatttctgttttccataaactttcctccagtaccttaaagttacaaacatttagcaaatgaaatatagggaattagctcacttttgctaagaccatcttccagattgggtactcagagcaacaatgcatgtcagggattattcacaggtaatgagcatggtaaagtaaaacaactgagaaattcttttccccctaattcttgttgacaatctatatattagactgtcttcaattaggccctaacatagatgcttcagaaattacatttcagtcatcagttttgccatatagggccaaagtaggacatgcttctgaacacatactgatgctctgatataacagtgtttgaaaatcattttatgacaaatccatcagttgtaaatcaagaaggtaaggaaactgctttctgcaaaataatcaactgccccaaaatgaccacacaggaccttgtcattgcacttacactctcagactcctttagaagcatttgagttttatattctttacaatgtctgtcttgaggagggttttaaaaacaagtactatttcctttgggtcatcacagaaaacatttagacatttagacaaaacaggcctgtctgccagctgtacccccaccccattttcatactaagatcctggtattatataaaactgaaggattaaaaactgtatagctcatacctcatttcttggtgaacttcaataaaattctaagcatttaataaaattagacttctcgttttgacgtgttctccatgttgattctttgttttagtttatccttatgtgggccgatggcagcttatgtgaatcctcatggatatgtgcatgagacacttactgtgtataaggcttgcaacttgaatctgataggccggccttctacagaacacagctggtttcctgggtaatattatggtggtggttgcttttttttttctttttttaccttaattgggcagaaaaatccagagtcctaagcagagttgccacaatctttataataaaaagtagacagacaaatgagtaatttgctacaaaaattagccgggtatgggggcaggggtctgtactcccagctgctcgggatgctgaggcacaagaatctcttgaacctggaaggcaagagtgttgcagtgagccaagattgtgccactgcagtccagcctgggtgacagagtgagaatctgtctatttaaaaaaaaaaaaaaatttatttaaatgtccttcattccacaaatagctagaaacatctgttgcactttttgtatcttttatcattgaatgaaaggaagaaaaggttgacaactgcagttgtcctcagattactgtatccagttaaatccaaaattgtttttttctgtcagtcatgtaattctgaaaatcagctgtcttatgacccagtagaactttatatctggaccatattctgtagtaatgtaaaaccggagaatgtttacaaagcaatgatagactaagaaggtgcagaacccattgaatcctgcttttcttctagtttgccttttgtttgtttgtttgtttgcttcagcttaatgattctctatgatcctgggaacctgttcagttccctcagctgtactatcttcagttttcaaagagggatgctaagaagggattacatgctactctggggttaggactatgtatcttggattgccctatcttacttggcaccctatgtgaggactaaaactagaatacatttgttactataaataaatgtggcatggtatacctagggaaaaaaataaggaaacagttgcaattacatggtttatcttaagaacaaaataccatggtttgtatttctggttgcattatctgacaatcgttcttattttagaatagtagtttttaaatatttattttttgagacgtgtccttcctggcccatccagtttaactcagacagaagtgcattatttctgcaggtaattgctgttttctaacttgactgcaatacaacaaaggaaaagccagtacaagttagaatgtggtgccagtacaagttagaatgtggtcttggcaaccagcaatttctataaagaaattcataagattactctttatttctatgcagtagaagaaaaatgtaaacatggcttaagagcataaaagtcatacatattacaaaattagaaaatgtttttagaaatgtttttaggtttcagggaactgtatggatcaaatctcaacttagaatctctaatccttagaatttgcctctaaagtctgtcttcatgataggtttatatgataggcttggagtacagaaatgtttccttagctgatatctttccttaatttcttaggtatgcctggactgttgcccagtgtaagatctgtgcaagccatattggatggaagtttacggccaccaaaaaagacatgtcacctcaaaaattttggggcttaacgcgatctgctctgttgcccacgatcccagacactgaagatgaaataagtccagacaaagtaatactttgcttgtaaacagatgtgatagagataaagttagttatctaacaaattggttatattctaagatctgctttggaaattattgcctctgatacatacctaagtaaacataacattaatacctaagtaaacataacattacttggagggttgcagtttctaagtgaaactgtatttgaaacttttaagtatactttaggaaacaagcatgaacggcagtctagaataccagaaacatctacttgggtagcttggtgccattatcctgtggaatctgatatgtctggtagcatgtcattgatgggacatgaagacatctttggaaatgatgagattatttcctgtgttaaaaaaaaaaaaaatcttaaattcctacaatgtgaaactgaaactaataatttgatcctgatgtatgggacagcgtatctgtaccagtgctctaaataacaaaagctagggtgacaagtacatgttccttttggaaagaagcaaggcaatgtatattaattattctaaaagggctttgttcctttccattttctttaacttctctgagatactgatttgtaaattttgaaaattagttaaaatatgcagttttttgagcccacgaatagttgtcatttcctttatgtgcctgttagtaaaaagtagtattgtgtatttgctcagtatctgaactataagcccatttatactgttccatacaaaagctatttttcaaaaattaatttgaaccaaaactactactatagggaaaagatgccaaaacatgtcccctcacccaggctaaacttgatactgtattattttgttcaatgtaaattgaagaaaatctgtaagtaagtaaaccttaagtgtgaaactaaacatgttctttgttcaaataatgtaaaatatctactcataattttaaagttctaaaaaggctgctttgccacctacctctttgcttatattcaagggtttagtgggtccttccttccacatttgtatgataactttcgttttattggtagtcctttgctactttaaaactaatcaggttaaatgtttactcaaatgtagtaatagtatgaggccaaaatacatgccttgaaggtggagtgaaatcagttgagtgtcacactgcatatttatgtaaatagagtaaatgaaaattcaagaatacttccattcaggatatgcccctgccttattttttctaaggtctacttttactactttaataattttgggtttgtgtgacttcactggtctggtttgttcctatagttcttacactgcactaaaacttacttactccaggaagttcctgtcagtagcatagtacctctctgtaggctgaactctaaaccagttgcaatgagttaccttttccctctgaaaagttaaaatttcagtatgtcccataccgtttactagcaaataaaattttctgatctgtaaaaacacacatatactatactactactgaaaatggttttacacatgacaaaaccagacctgatagctaaatctgcatactttctatacagaaatagtatgtattatatgacgttgggtctaaatctgtattttggcagtacttaaatattttaagtaagtatttcaaagtattattttataatgcatctaattactgacctgtatgcagtcatttctgaggctttcttgcatcatagcccctgtgacatttcctcttagaaatattacactctacaaaattgttttatcaaggtccaaaattactatttgctcatagagtacaaagatgttatgactggctacacagaaaggaaataaattatgaaatgtcagtatagcagctgaaattatagcagctgaaataaacagtttgtattatacattttatttacctgatgaaagcatttaggactcaaatctttagagaataaatctttagagaatatataataatagccatatccttttaattaataaaataacactttaaagacaggcatattaccattgtatatgacacctaatacacattgtcagataccacataaacatatttatcttccaataccaatgtttgttttattaaaacaataattaattaattaataggctcaatagtgaccctcaagttaatcccatgactttcccaggctctgcatgcataaagaaatcattgtgacagaaaaatatcaaccacatactgaagcatagcttgctagaacaaatcctgtacatatgaatgccagcaactggggacacatttagtattcacattttatgcaaacttacttggtcaattatttcttttttaagcacaggtttattttggaattcagataagaactgacacatcatagacagtcattgttaaggtaaccctgttatttcaattgcaaacaaacaataaacgttttttcttcaagacagttaccactttttaagatcttagtactaccctatgcaaaaacagttttttttaaaagcctgaacaggttaagatagataatagccaactatgttttctcaggtgaaactattccaaaagaactgtacatttcagtgatataaatcagatccagaaaggtggatctctgtttagttcttgaaatatataattcacaaaataagacccttgttgttctacagaggtcccctaaactgtcttttattctggtgtagtctctaaaacctcattaagagggaggggagaaaatttagtcttaccagaaatgctctgctttttagtagccatcagttttaggtcttctttatgtaactcagaagttcatctttttccatttggtaaccactttttttccactgttctcgcaactgttgtaatagagccccaatttcttttcctgaagaaatgcccacttttctgatgtcatggccacttacaggaaatggaggaatggaccactgctgcatttcctttaggagacagtgctctccttggtacttcagtagttcacatacacgagtagttgcatcaggttccctagactacgtgtcaaaatcaaacatttagtttcgtcacacatgaaaacatacacttacaatcttatcctaaaatttaaatactcaacataaattttttcatttaaaataagtaaaattcacagatttgtagatcttagttttaataaattaattctaaattcgtgacgatacttcatatttctgaccaagcctagtatatacttacatctataatgaagtcttgatagggtttcaatgggtctgaactatctgttgctttaattaaatctttcctatttttaactataaataagccaaggtttttctcctctttcgcgatcttcaacctcaaatcca

SEQ ID NO: 1954 - DNA, 32178 bp, Homo sapiens
gcgggtaaacagacatggccggcgaaggagatcagcaggacgctgcgcacaacatgggcaaccacctgccgctcctgcctggtaaccgcccggagtagttccctgtagtcgggagtggggcgaggctcggagccgctagcggtgcagctgggcctgggaggcgggcgtgggggcgccaagcctggcgagccagcccagcagggccgcaccggaaagctgcttcacgtcggccctcggccagcgatggagtcgcggcgctttcttcgctgctctgttgccccgagccgtgagccagggtgtcggggggagcatttgctattaagaacaggaaacccatcctctccatcctccttgtgttctgagtttagctcctaggaaatgctctgaaactagaggaccgggtcagattcacagcggttacttttgctggtctccttccttttaataagagtgacagctaacatgtactaagcacttaccatgttacgagccgtgcagttaacgctttgcatgcatgtcgccttttaatccttcccacatcagttttcagtttccgatttgataagcgagtattggatttgcagattagttcaatgacttgcccaaggtcacacagcagagtcaggattccaacccgggtgtgtctgtcattatatctctaaaccacttctctgttttgtttttcttactatcggtctttctcaggcatgtacgattatgcttaatcagagatacttagtttttctttttcgtgtatgttgtgtgaaatgtttagactttggccttgtgttgaaatactgaacaaaaaaaaaaaggcatggaatattgcataaacttttcatggaatgcctttcaagagatgctttccaaaaggtgtatcatccaaacttgaaagtgttacttgagtcccttcgttatatgacaagtatgttaggtgttgtggagatgaaacgagaggtaatacacaatctgataattgaggtttactgtctaggcggggctgctgagaatataactaaacgtaaatcaactgcagaggcggttgatttagggccagataaatgaatgctgttgtggctcttcagaggcagaggttgtttaagggtcagaggatttgggaaaaagcctttcaggtagatcaggagacatctaaaagcacatatttaggatatggttgtgggacataaggcctaggaggtatattgggtctaagttgctgggaaactggcatctcttgccagtgggtttgggtttttcctgtggattgccaagaaacagttttaggtttcaggtaattgcctaaagaaatctatgcttggaagattaatttgtccactggtagcagcatggattaaaagaggaagagactgagtgcgtgcccaccatataggagagaacttttctgtaaaaataaaccatagtcactggttgttctcgaagccattctagctgagttgacacaagggtaagtgtgccagcctttgatggaaagctgagctattttttcagagacattagccctactctctgtgccaaatccggtgtttcagggagaatggtgaatagaagagggaggatactgatcttctgtcgacattcacatcgtgcctctgcatgagatgagtcatcagacttcactgatagctctgaacagtcagcgtggttttttgtttgttttttttttgtttgttttgttttgttttttgtttttcagaaaagcgtcgggagagggcccagagatggtgtagatatagcaataatgcctctccaaattacgtaaattttatttgtagggaaacactgggctttccataattccatgtagtacgagttgttctgaagagtaaatcctctaagttccaacaaaaagctttatatttgagatgtgaagagtttatcctaggcaaatgaaacattaataaacataactgagtaggggaaagtggtttttagccatatttatgaaaaaaaggttactaaagaaattatttagagactaggagtcagaacagttaaaatgtaaatttttaacaatattaattccagcctttgagctaatagtttatcttttaaactttctgtagtagagcaataaagtgggttgtgctgcatgccaagtgatagccatactgtcagagttggaaatacaaacaatttgatgcagaatatttttgtcatccatttagatagctctttttttatctcagtgaaacttacatgttccaaggaaaatttgtatgaagtgttagaccattggctatttacatataagttgaagtaattctgtttttgacaaagttttatatctaggaagttgtaataataaatagaaagtccaaggcagttaccatattgaaaatcatttttattttctgtcaggggcctggctagaggtggtttgacttaaataatgatatgcaaaggaaaacaaatgattatttcgtaatgacattttatcgatttagaagtttatttggggcatttaaaaatacatgaactgggaggtgagaaatgagattcagtaattctttattgttagtctaggccagggtctcccaacctcagcactggacttttgggctggagaattctttgggtgggattgtctcgtgcattgtaggatatttagctgcatccctggcctctacccactagatgccagtaggactcccttagttattgcaaccaatatcccctgaggggcaaaatcacctgtggttgagagtcactggtctaggataggaaatttactcatagtttgtatgaaaaggacagactcacagttagtacaatagcatatgtattgtgtagcgttttctaattttctttgctgtcattggtaacatctggttttctaagacattcttttaaaatgttttatgcttcatgcaaactttatttttaaatttaaaattaagcaaaatagtatgcaaatgattgcaaaattttctttgtttctttcttttgagatggagtcttgctctgtcgcccaggctggagtgcaatagcacaatctcagctcactgcaacctccacctcctgggttcaagcgattctcctgcctcagcctccccagtagctgggattacaggcacctacaaccacacccggctaacttttgtgtttttagtagagatggggttgcaacatgttggccaggctggtcttgaactcctgacctcaagtgatctgcctgcctcgtcctcccaaagtgctgggattacaggtgtgagccaccacacctggccttcattttaagataatgtagcgactgccagggaaatgttgtcactagaaaaatgctgtgaaattcttcctgctaggttatctttctctcagttttaattaacagatcttgcctgctttgtttcttttcttacttatgtaggaactgattgaagttgagagtttgagagaacgttagaggttgacttgttgaagcctatcattttgcagatgaggaaactaaaatttaattgggcagaatgagttgtctaaggtgttaaaattagttactggtgagggagaagagaaaaatctcccatatagaagaattttaaataacttacatttcctcttcaagggagtggagcataactcatcacccctgaagtggaggctacacctagtgatttgcttccgaagggtacaatgtgaaaaggaggggggaaaggaactttacagcggaaaaacctgacacacactgctgtagccaggtgatcaaggttaacagcaggaatagttcataatatataggctggatatgtaataaaaacagcacattggcaacagaccccatttctaaaaaggaaaagaataacaacacttcacttctgtggtcttcctccctaaaacacgtatcctcagtctaatcatgggaattacatcaaacaaaacccagttgagggatactctacaaaaggcctgaccagtactcctcaaaactcagaaacaagcaaagtctgaaaacccccctagcccagaggagggtagggggacctgataactaaatgtaaagtgggatcctggaacgcaaaaagactagataaaaactaagggaatccatttaaaatatgaagcttagttagagtaatgtaccaagactgattccttcgttgtggcaaatgtaccatactaatataaattaactataggggaaaaggatgtgtgacacacgggagcattctgtactatctttacacttctctgtaaatgttaaactattctaaaattcacagttgacttaaaaaaaaaaaatagctactgacagagcccagcacggaccccagtcctctggctccctcttcacggtgctgtagagtttaccaaatgcatgtggttttagaagtacccctcttttgaagaaggaattacatgtttgaaaggttttcattcatctttttttttttcttacaatattctacttttatagcagagagtgaggaagaagatgaaatggaagttgaagaccaggatagtaaagaagccaaaaaaccaaacatcataaattttgacaccagtctgccgacatcacatacagtatgtaatttagtgacagatctaatataatagatatacatttaaatgtagataaaagttcataaaaacaagtgactgatatttgtattactagatatcagaaattgtggatgaggacatgtagtcctcatttgccagtagataaacatttaactgtaatttttaagaagcttaatactatgttgtggtagaattgtttgaggaattgttgctctttatactctttctggtaattgagctattaaatacttctctgtacttctaggtactagagtgttattgaacatactaacattttatacttactgtttgtgatatgtgggcatagagatatttcttggtaaaaataatactttgtactaaaaaaattcttgaatttctgtgtttgtgatatattcataaaagattagaaattcttctaagagttaaagttagattaaaaattatattttaacatgggatgcttatataccacgtttattaagtgtttgtaaccccatttgtatttttttctttttttttgagacagagtgttgctctgtcgcccaagctcgagtgagtgcagtggcacaatctcagctcactgcagcctccaccttccaggttcaagtgattcccctgcctcagcctcccgattagctgggattacaggtgtccaccaccacacctggctaatttttgtatttttagtagcaacagggttccaccatgttggccaggttggtcttgaactcctgacctcaggtgatccgcctacctcggcctcccaaagtgctggaattacaggtgtgagccactgtgcccggcctgtatttcttttaatgtgatttgctctttagtctgttgagcttacatttttattacatatcgatcatgacactatacctatatatgtttttatatagtacctaggtgctgatatggaagaatttcatggcaggactttgcacgatgacgacagctgtcaggtgattccagttcttccacaagtgatgatgatcctgattcccggacagacattacctcttcagctttttcaccctcaagaagtcagtatggtgcggaatttaattcagaaagatagaacctttgctgttcttgcatacaggtaaaatattagagtccatttgcttaatacattccctctcatgggtaattgcagtggtcagtgttgaagccaaagcaggctgttatttcgcatgtacaggagaggttgggtaagaatgtgaggttaggaatttggttaagtagaagtttgatagtgcaagttggagtatttttgttcatttcattaccatctaactcagctcttcaccttcatacacaatttaactttctggtatttgaaaaatttttaatcatttatatttgatgaaaaacatttctggaatcttagtttcaataactgtcttcattatagagaagtagtgcttttttattttaacgtaaaggattacttttccaaaagagtggtcttttctttccctctctctcaaaattcataggttgtaccactttaaattgaagctgaattttaagtatcccatggcaaataaaggaaatctgcggtagaggcaggaaatacatacaggaagctcccaccccagtacagtgctgccagtaagcagcagaaatgataagtcatttgacagagtgaaagaatgtttggtttgggaaatgagtttaaacccctgtaagttctaaattattttcagtgactagaaatctattattttcctaaagttctctaattgtacttcctgagtccttcttgtatatcccccatgtgatttaaaaataaataaaattggccgggcatggtagctcacgcctatactcccagcactttgggaggccgaggcgggtggatcacctgaggtcgggagtttgagaccagcctgaccaacatggtgaaaccccgtctctactaaaaatacaaaaattagccaggcgtggtggtatgtgcctgtaatcccagctactcaggcagctggggcaggagaatcacttgaacctgggaggcagaggctgcagcaagccgagctcatgccactgctctctagtctgggcaacgcagcgagactccatctcaaacaaataaataaataaataaaattatcctagctttgtagtaagggttgattctataaattgtttacctgtatttattgctttgcctactttgcatatatttaaaactcaaatgttcaaaattctttccttttaaaattttcttggaagcaatgtacaggaaagggaagcacagtttggaacaacagcagagatatatgcctatcgagaagaacaggattttggaattgagatagtgaaagtgaaagcaattggaagacaaaggttcaaagtccttgagctaagaacacagtcagatgggtaagaaataacatataccttaatgctctttgaatgtttcctaatgaaatagttttcttgtactttttctgttctactgagccttcatattttgtaacttttaactagttgttctctttcccttctaaggtatagcccagtggtttccaaccttgctatgcatcagaatcacctgggaagcttttaaaactatagaagcttgagttccaacctcatctcccatctccagagagtgatgaggctgcagcatcttttaaaaatgattttcaggtgattctaatgtctctccaggtttgagaacaatcatgtaaatccaaagggaagtgttgtttgggatttggcttctttaggattgaaggcctctcggagcataagaggatagggagaccagaggcttgtgagctgttcgtgtgctcaccaggacagctgtggtttttgtagcattgctatgatgtttgaaagccacactggttacatctgcctactgctccagctgagctataaaagccatttatatttcgtgtccctctccagtgtgaattttatatcacccagaaatgctatttacataataaatgatcaataaatacttgtagtctatgtgccttgtgacatttagaaattccctgagtatactgtttcagcagtaattcattttgacaaagctgtcatggctgggttttgcacaaattcaagggatacacattaaaacagacacaaaaaagtccagtttattttatcctcttttaaaaaggaaacaaagcatttgccttgatcactggatattacctcttaacggagtgcttctaaactgtggcatcacccgtgaggtctcacagatacacagtcctggtacgcaatacaagtactagtgaattggtttccaatttatacccacagttgaaaatctcatcagacctctgtgttgcccaggtggtatcttctgaacacatgcaagttctgagtattttggggtttttttgggcggggtgggggattaagactgaaaaaacaatgtgagcagcatgagggcaggaacgttttgtctgttttgttcacatggtgggcgttcctatatatttttgaattatgaaaatattgacatgtcaggtagctccttggagctaaagagagcatagaggcatgtgagatgggattgccagagctcttagggtgtttagttctccccaggtacttttccagaacattcactgtgcaaactttgatagccttaccacattgcactgtcctgacaggattttatgtacgtctccctcaatagataagctgcttgagaacaatgaccaagacttatttatgttttacatttaggaccataaattttatataaatgaatgaaagaatgatctcctggggcgggtgggggtggtctgcattatgataattagcaaactgttttgttactgtggattttgctaacagttccatttttaaagtacttcttatcttcatacaattttgattatttgtgaatacttttatagaaatcattaaggaaaattgacttggggaaaagtatatttctcagactgtcttgacattagtgacttttgattgtggaaaaactattgaacacaagatggcagtataccgttaactctgaaaacaagacaaggaatggatttttgactctagtaaagattaacatcaggccgcgcacagtggctcatgcctgtaatcccagtattttgggaggccaaggcaggacgatcacctgagctcacgagtttgagatcagcctgaccaacatggagaaaccccatctctactaaaaatacaaagttagccgggcatggtggcgcatgactgtaatcccagctactagggaggctgaggcaggagaatcgcttgaacccgggaggcagaggttgtggtgagccaagatggcaccactgcactccagcctgggcaacaagaggaaaactccatctcaaaggaaaaaaaagattaacatcaaactgatacaggtggacaagacttggaaagggcacattctctctagtattctgtagacccattattaaggcctctcataagggtatgtctgtcttcatttaaaaggcctctgtggaatgagatttctcttggctccactacttctctggccctgtaaccaccttcactggaaatggtgaaatgaaagaaattctggagttgatttagttcagtctcgtctttttctgtatcagaatgccaggtactagagaggttaagtaatttgcttaaacagcaaataagcgacagacctgattggttctaggtcccatgacttccaaactggtactccttccattataccagaatttctctataacacatttgaaactcaagccagcttccctttctccagtaaaatatttaatattcatttgtttttcttagagaaataagcatatagaaaaataaaaattaaaaaatataaatatccatcttttacctaaatgacacttcatttattaaaagtacactacagaggccaggtgtggtgactcatacctgtaatttcagccctctggaaggccaaggtatgtgaatcatttaaggccagcagttcaagaccagcttggccaacatggtgaagctgcatcactactaaaaatacaagaaattagctgggcatggtggcctgtgcctgtaattccagctgttcgggaggctgaggcatgagaaccacttgaacctgggaggcagaggttgcactgagcagagattataccgctgcactccagcttcgccaacagtgagactccatctcaaaaaagaaaaaaagtatacaacccccaaagtcatgagtgtgtgtgggttggggagggcggagcgggggtgggcatcttctgaacacatagaaattttttttttaataaaaacaggtctcactgacatacgactcttcagaagttcctacttcttagcatgtagagagggggaggggattgatatcctattggcatcacaagagaagatctcatacctgtctagactgagaccaataattgttagtcaaaaagttagctgaagctggaaatcacaaaatgttacacatatatagcttaaacattttattttaactttataaattcattcatttttcatctggagagaccaaggtctttccattgaagcagttctgcagattggagatgactgtagactttctggcactttcattgtacattatccacagtttatactgctagtttttctttaaagagggattctaaagatagtcacaaggcaatttgagtgcagaatttttccagatttgtgcggtttttttcctactattagagtagtctgtacctaatttgaaagcagtttatgtctcaacttaatgttccttgaagcagttttattgttgaagtcatatttcactggtttttataacatttatataaattatgttgctgtaatcacaaaacaactgtgataaacaagttggaaagaaaaaaaactagcttatgttaaaaacaaaactcagctgctgggagaagaaccagccactgcatatgcagtggaccctggccatgtttaaccaggtaaaggagagcattccttaatccttcaaggcaattcagacagtttgtactgcagactaattaacatgatctgtaagccaggggatcaataatgttactgtttttatcataatcaaatcttatacaatagttgggtaaagcatagttcttaattcagttacctataaccttgaagaatcagatttctaaaaatttctataggatggtatatacttttaccttcataatgtaattaacaagttatttgtgttcatgaatcaggtgaagaaaattgagattttgtttctaatgagctctaataataatataagaacacttgaccataatttgactatagtaaaattttttaacattttccgaagtcatgtagacaaattttctgagtatttctaatgagtttgcaggaaggaaataaagttagtagagtgagtctactattatcattaaattaaacttagatactttctaacacactcagttatttttccttctaataaataagtaaaatgtcagaatttcatccataatatcttgtggtcaaacagtggttattatgaaagactactttagaagtcttaagtataactaataaagcagagacttttaatatatttgactttgtcagtctgacagtgttatatactagcatttgaatatagttacatattctacatttcagaagctacactctaagagatagaatgcctcacaggaagatagctcatagatacaaccttcctgtttgcactagttcatgataagatgtttgcaattatgatattctcaagtagcattttggaaatgactttattatgacattttaaataacttttaagaaaaaatctaatttatagtttgatcctttgtacagttaaactcttaagaacgtgaaaaggaatgcacacagaaaggttgcatgtaactctctagtgttattttaattcatccatgtaaatgcattcttgatttttctcttcctttctctacttagattagatgacttatgagaaaggatagatgtaagagttaagcagcataagaagtggggggatagaagaatttgggtgtcttaagaatgtttaagaaagtagaagtatcaagcagtagttggttgtatgttggtttttttaaaactttgtttcatttatagactctgtatttatctgaaatgtgtagatctccctttccattccacagtgacattgaagatccgtaccttaggttatctttggttttaactttggtatgatttatgaaataaaattattttctgaaagtttctgtatcttaacatcagtatttgatgaatatgtttaaaagataaaacttggaaaatcttggtatttaaaattatcactgtttagaaacttatagttttgagttagtcaatcttagaaatgaataccatgcttggttctctttattttagaatccagcaagctaaagtgcaaattcttcccgaatgtgtgttgccttcaaccatgtctgcagttcaattagaatccctcaataagtgccagatatttccttcaaaacctgtctcaagagaagaccaatgttcatataaatggtggcagaaataccagaaggtgagaaactaattttttatgcatcttcaaaaaatgaagacaggttgttttttttcctgttttaagaaagaaacacaactttcatgattcattacccagccaccttgtatggcaatattccagctacatttgatcctctaaaaattgcacaggcagctactttatgtaaaagcagtttacaaaagcaataaaatgtcacacagctgtaaggtatccttgttattatgcttatcagctatattaatcgcttttgatttttaattccatgggaaatgcttattaaactatgatcaaattagatgttcggctcttgagttataaacatccattatcttaaagaagggaggattcttttggggtagagtagtagtagagaagtagagtctgttttccttcttccaaaccagagagaaaggtttcttttgctatgtgttttaatgaaatacagttgacatcgcagaaattgacttgagactaggtgctctttaaaaatgttgcttgtttgggcactaattcctatgttatatcctttgactaaatcataattgtcatagggaaaaaaaattgagggagcctgtttctactcgtttgtgagatgtgcaattttaagtatagttaatatttataattgctacctaaagaaaaagattactagtttctaaatttagaataattgggctttttgagtttttttttttaatatggaaagacagtttccactgtaaccttaaaaattctctattaatcattcctttgttgagtggtgaggatttaatattttaatgtaaatacagaatcctaatttaatgtaaattattatggataattaatgaagtggacttatatactagtcactgtaccgaatttttattgttcttgcagtagaattcctccagttttcagcgaaaacttgtgcagaatgggcacttgatgggcatcagggttataaccaggtatctataagacttcctggtctttatctcagttaactgatctgtttcatggtacagtgtgttttgactagtgtttctaaggaagattctaataaggaagatataattagactgctttaagactcccaaacaaccttgaaactagtattttttaacgtttagtaatattgatactgcctttagttaacaggcagcttttgtgtagctgtattagtccattttcacgctgccgataaagacataaccaagactgagcaatttacaaaaaaagaggtttattggacttaaagttccacatggctggggaggcctcacaatcatggcagaaggttgaaagtcaaggaagagcaagtcacgtcttacatagatggcagcagggaaaaagaacttgtacaggaaaactcccatttttaaaaccatcagatctcatgagactcattcactatcacaagaacagcacaggaaagacctgcccccataattcagtcacctcccactgagttcctcccatgacatgtgggaattgtgggagttacaattcaagatgagatttgagtggggacacagccagatcatatcaccgtgcaatactttcttccccataccagatgcagacactttaaatacatgtttacccttgtttcttttaactgaactgtgagaaattttgctcccatagtcattttaaatgttactgttgaaataagtatgtcagtgatcactgtcagtatgtggcccccaaggagtagatttggaatatattaagtcatttagtgcctaaaagtatgtttggcactggtttgctactgaaatacgtggcaaggtaactgcatcaagttgttccctatgtgtcatctgaatattcacgtagtgatgtatttcatactagagattttttttcagggggtacaggcataccacggagatattgcaggttcagtttcaaactgctgcaataaaacaagtatcacaataaagttagtctcatgagttttttggtttcccactgcatataaaagttttattcacacaatactgtagtctatcatgtgtacaataagattctatctaaaaaacagtgtacataccttaaataaaaaaatactttattgctaaaaaatacaagcatctgagccttcagtgaatcataatcttttttgctggtggatagtcttgttttgctgttgatggctgctgactaatcagggtagtggttgctgaaggttggggtgactacagcaatttcttaagacagcaatgaagtttgccccacagattgactcttcctttcacaaaagatccctctttagcatgcggcgctgtttgatagcatttaagccacaacagaactttcaaaattggagtcagtcctgtcagaacttgctgctgctttatcaactaagtttatgtaatattctgaattctttgtgtcatttcaacattcacaacatcttcagcagtagatttcttctcaagaaaccactttatttgctcatccataagaagcaactcctaatccatgtttgatcatgagatcacagcaattcagtcctatctgtgggttccacttctaactttagttctctttttgtttctgtcacatctgcagttacttaactgaaggcttgaaaccctcaaaatcgtcatccatgagggttggagtaaacttcttctaaattcctgttaaggttgatattttcaccacctcccatgaatcatgattattcttaatggcacctagaatggtgactctttttcagaaggttttcaatttactttttccagatccatcagaggaatcactatctgtggcagctatagcctatgaaaaatgtatttcttaaataataagatttgaaagtttaaattactccttgatccatgggtcacagaatggaaattttgttaccaagcatgaaaacagcattaatctccttgtatgtctcccatcaaaacttctgggtgaccatgtacattgtcaatgagcagtaataattataaagagtcttttctgagcagtaggtctcaacagcaggcttaaaatattcagtaaaccattatctaaacagatgttctgtcatccggactttgttccatttactacagagcacaggcagagtagatttagcattcttaaagggccctaggatttttggaatggccagtgagcattggctttaacttaaagtcaccagctattagcccctgaaaggagacttagggactttctctggattaggctttggctcaacggaaatttgtggctggtttgatcttctgtccagaccattaaaactttctccatatcagtaataagactttttggctttcaccagagtagcatttcatattcacagctttgctgtttgccccaggaggcctagcgtttggcctctttcagctttgacatgtgtttctaactaagctttatcatttttagcttttgatttaaagtgagagatgcttgactactcttcttttcacttgagcacttagaagccattgtaaagttattaattagcctagtttcaatattgttgtgtctcaaagaaatagggaagcctgaggagagggagagagatggaggggctcgtcagtggagcaatcaaaacacatttgttaagtttactgtcttaaatgggtgcagtttgtggtgccccaaaacagttacagtaataacatcaaagttcactaatcacaaatcatcataacagatataacaatgaaaaagtgtgaaatattgtgagaattaccaaaatatggcacaggcaggtagttagcacatgctgttggaaaaatggcttgatagacttgcttgaaacagggttgccagaaatcttcaattttttttttgtttgtttgtttttaaaggcagtatctgtgaatcacagtatgcctgtattaagtatttgggtatatagaatagttcttcggcaccaagatggcttaaaaattcttaaccattaaaaatcctaaattaacgcttctttgcaaagttctaagtatagagtgagagcagtggtagttaattcctgactcaagtgctctgtacagctagttctgtgacctgcctgtaggatcctgcagtcttaaacctgaacttgggctaagcaagtaagactgctttttaaatttattttttatgtgagttactacttaaattcttcctgttctatggttaaagcatcttgtttacattacattccgaatttggcccatgcaactgggttgccactggcttaataagacaagaaaagatagagctgggaagaccaaagaagcacatatttgcctgggttcagatcctctgaatttttcctcttgtcttaattagcccttggttattttcatattcagagttgccaagggctaaagagacgatgctaaggaatgagaaggcctaaaaggttttaggtgatacaaataactccatcccatatacgtcaggttatctacagggttcccttgcttaaacattgatagagtttcttaggttctgaaatttggaatctagatcactaggccaagagaaaccgctagctgatctattttggactccaggtgacctacaaactctgttctgctttagagagaccacttagagccattctgtgtgcatcaaaaaggaatctaacagggaaaggggatggcagatatctttggtgggaactccgtatgcagtgggaccatctgagtggtttggcatgctgcacctttagtgggacgctagcttaccatgagggctggattatgtaacagtgtttgtctttagacagatacaaggttcagttcattcctgtcttcatagagcttgcttgtatctgatttgtccatcccaccataatctgaagtactgcatatgtgtcttctgtctctgtgtctgagtagtagttaaaatggtcagagttgggagatgcttacataactaagctaactcaagctaataaggttgccgcgcacttttcctgcagaaaaggaacttaaagtatcgaggattgtagtcttcctgagatatattcaattaactttgaaactgcacacagcatttgccgtggaaacctaaacaactcaaatgacatgaaataaaattatttaagcttctggaagtgttctgtgttatctaccattctgacaaggaagcattagagaagattcagcacgtgtctctcatgattaaggagttaggccagtgtaattaggaaacactttcaaaacccactccatctagagacatttcttgttctggaatttgagctctgaaactgtttacttcttttcccatcacagtgcctttctctattcactggtttactgtagggggatttgagaatccccctacagtaaaaatcctcctcaaaaaaaaagaggaaattttgtttaaacctgtttggagtatgacttaaatgtttctaagtatattccctgcttgcccagaccatctgcttattcatatatcaaggcttactatgttaatcagaaaagagttgagtatgaaatgtaaagataagtcaaatgggaaacagatactaagaaagtaatgagtctcatctttctggcctctgttgaacttagccatggttgttcctgtttattgcgtagagcagggaggaactgagcatgaatttggaagggcaggggtctcatacgtaatctcccagattagtgtttaaatctcctcctaattttatctagatacaaatgttcttatttctttcttatacagaaggatacgtacctttttcttaacggtgtatcttataggagattcttttgtattagtttatagagcattgctcattcttaaagctgcttggaattcttttgtatggatacactgtataaccagtcccatactgatgatagatctgtactaaataacatgtacaaatgaccttttatataggtaaatatttatgataacttttaaagagtgaggttattggctcacagggtaaatgcatttataattctgtcagttttaaaaataattttgaggccaggcacagtggctcacgcctgtaatcccagcactttgggaggctgaggcgggtggatcacaaggtgaggagttcaagaccagcctggccaaaatggtgaaaccccgtctctactaaatatacaaaaattagccgggcatggtggcgggtgcctgtaatcccagctacttgggacgctgaggcaggagaatcactggaacccgggaggcgagttattttcaaaatacttaaggtgtttgtacttatttttattgtttcatcatggcctgacaggcaatgtagtatcaaacctgatgtttgctgatctgataagtgaaatatattacattgaaggttcaatttgaatttctctgagagcaagggtaagcattttgttgtaagagcagtttgtgtttcctttctgtaaagtgtttgcccatttttctacggcttgttgatttcttgggagttccttgtaagctttatagtctctgtaattaatgagttccaaacatttttcctagtttgtcttttgtcttttgtttttggtgtggtgtgtcaaacagaactgtttttttgttgttgttcttacatagtttaatttttaatgcttctgtattctaaatcatagccaaaaatgacgttcccatgcaaaggaatgtctcatgttttctttggatacttgctgtggtttcattacttttccgtggaaagctctgatccttgtgcagttgatcctgatataaattccactttacttttttccagatggctccctattgtcctactaccactttttgaatagtccatattttctcccattgatttgagatgccaccattgtcacagaccaaattcatatgtttattttacttttcttctcttttggtctgcttgtgtgccatcatcatattgttgttaatgttggcactttatactttgtgtaaataaaaatagggctggtaagcccctcactgcttttttgtcaagcttttcagtgactaccattgattaacatttccttgtgaacttgagaatctgtttcaccttgttccaggataataatcgtaagaacagtaacatttattgactatttttatataaagaagaaaagtcttgaaatcttaggctatgtatagtcaggtgcttcctcagaaagactggtcatttcccaggcatacatcttgtatgtacacttgtgtatctgccattagcgtataagcctcaggagtaggaaagagcttatcattccatcccagttcttattaccatgtaggaatttggttcatgaaagaaggaaacaaaaactggtaactttttaattatttatataaattatttctgtcatttacattgctgattgtaataggatttaacacaataagtgaccacttttagtcactatataaaggaagtcagtggtagtgatttactatttatgtttagcttttcacattactctttccattttcattgcacttcaaagactcacttaaatggagtttcacatgttttgaacattctacgttgttgggaggcaaagccgaagccatagttatgaggcttaagaatggaggactgtgatagattacctccaggtaacagattcgttttaagggcttttatgcctgctttcagtagtaaatcctgttcccagagtgaatactactctgctggagaatccgtcattggtcacttttaagtgcctaaactttttggctagtattaaaattttcttgaggtataaccattttatgacatcaatcatggtgttgatatatttaaagaatgcctataaattgctagaacttatcatccattttacccagatataagacaggagcctttcctattgtgccagaaagctaaatgggactcttaaatttgaggatgttgaaatgtcttaaactttggcagttgctctgtaaaagctagctagctaatctgttctggtatatgtctcttcagtgtgtctaattgactaacacacatcacaaatattaaggatgtattatgcatatttgaatctgtcaggatgctccagataaagaattttagaggtcttctgactctgaaaagaagctacctgaaactgtagcttgctcatgggcatggtggcagagtgaatgcctgatccagtgcattgctcttaatatgctagtgtgccacattttattctctttatacttgaaatttacatattatttcagattctttttcttgacatgggtgccaaatgaaattacacttttgtactacacttttttacatttcttttgtattacaaaagtgaccattctgatatgtgaagtatattttaataactgaatgaggagtgtgtcagcgaaactaaaactttcagttgggtctttgtcattttgtaattctaagaatatatagcttcttctctctaaaatataagctcgacagggtattgaattttgttggtttttctttcattcactggcatagcctaaatgtataaaaatagcctgacacatgttaggcactgtattagtctggtctcacgctgctaagacgtacccaagactgggtaatttataaagaaaagagttttatttgactcacagttcagcatggctagggaagccttaggaaacttaccatcatggcagaaggggaagcaaacatgttcttcttcacatgatggcaggaagaagtgccaagcaaaagggtcaaaaccgtcttaataaaaccatcagatctcgtgagaactcactatcatgagaaaaccatggcagtaactgtccccatgattcagttacctcccaccagatccctcccacgacacatggggattatgggaactacaattcaagatgagatttgggtggggacacggccaaaccctatcaggcactcacaatatttgttgaatgaatgatggttagagtcagactccctgtatacagatcctagctccttcctatttactgactctgtgaccttgagcaagttataccatccttgtgtgcctctgtttccttactttagaatggagataataaactactaaccttagagtattcttacaagaaatgtgaaattcttggcacaatactaatggttgccattgctgttcctgaagattcagagctacttgatgtgctcttggtagtattttcttaaattctgtaactggactgtgacaataatcttaccattaggtatttagtcttaaaagtgagggacaacttattggagagtacctgaagggtctcatggtctgactcctcaggctttaaccactaccagagcacacagtaggaggccatctcagatcacctttggcaggggtccccaaatcctggcccacgaaccagcactggtctgtggcctgttaggaaccgggacgcacagccggtggtgagtggtgaacgagcaagtgaagctgagcgccacctcttatcagatcagtggcagcatagattcttataggagcgcaaaccctattgtgaactgcgcatgggagggatctagactgcgtgctccttatgagaatctaatgataaatgtaatgcacttgaatcattccaaaaccatcctccaccccatctttggaaaaactgttttccacgagactggtccctggtgtcgaaaaggttggggacggctgatctttgcatagtctcaaatataaggattatattaagccagaaatgtttctcattaaggaatcctttgttttgagctgtaggtcgtgttttagaacaagtctgtcctcttccatattgcaactcctaaaatatttgaaaaccagtgtgtccacttgagagacagctctaaactgaacatctctggtaacaagacattccctttgataataaaagttcccatatttgaacagcatggaatagaataacattgtctcatagattctagtcttctgttaaaaccgcagttacttttgcaccaaactaacatagctagaataggattggagtggcggggaagtcgagggtgtgagtggtgtagcacattgtacagttgcgtagtacaattccagctgtcagctcagtcccgagtcccttttatgtgtgctgtgttcccacgtttcctgcagatcttactccggcacttgcaagatcatatgactaggtatgaaacatacctagggtaagtatcattcagcgtatgaaacatacctagtcatttgatattgcaggtgcaggagtagggtcttcctcttgttttgttaaatgttaccttgtttttcttgttctggtctgttaaaagtgccttttgatctaccttattccttttctctctcactttcatgtgtcatgtcacatgtcaattaacattttatttacagtgaaattacaaagatttgtacgtatgtaggttttgttttgagaaaaatgtgataattctttatattctgctataccttgttctttgatcacttgcagagcattccttgatataaacatattctaatgtatttcactctatttttgattgatgtttaggttgtttgcaatttgttgctattagcactgctgcagtgcatcccttcagtaatatttttgtgtcctatagaccatttgcttctctttcaaaaattttgtggttacttttgcagttatgtttccaaacgaactttaaattatacttataaattccattctcactggtattgcactgaatatgtaatttgaggactgacatcttaacagtattgagtctccccctcaaatactgaaattctacaatttctacaattcacatttctccccctcaaatactgaaattctacaatttctacaattcacaattcaactgaaatttctacaattcacatttttatatggacttaggcatgctcctgtttggatttcagttacaattagaggtgataaataatcggtttcccctctccttgagttttatgaaatgaggaacttcatcatgaagtctcaagtaaacgaacattttatctttcttgggattctatcacttcttaatgtttgcccttatagtgattcagctgattctcatttaaagtttttacacaaaaacagtttggattatatcttgaggttttcacttcagatactggacaagtaattagtataaaggcaactaacatggtcataatagaagtatggtgtttactctcaacatttatcttcccaaagttgtcttcagcattgaaattttaatgtttgacctttttaaataggaatgaagattctagttacaatatatatttgaaggatataggaagcatgatttcacacttcatagatagtcacgtcatgggattatctacaaaattttttatctttttaaaattagatgttttcctaggccaaaatcatttttcagatgttgctcattccagcattagaatctttattctgtggggttttttaagtgcctttttgttttgttttcagagaaagtttcattgtgcaaatctaacttcatggcctcgctggctgtattccttatatgatgctgtaagtaacttaccttaaatttactttatatatggtaggccatgtcataattaagggtcattaaaaaacaaaggtttagtttttccagtttctagtgccttataacttaagatatcgttaagagtggtggctcacacctgtaatcccagcactttgggaggccaaggcagggggattgcttgaagccaggcattcaagaccagcctgggcaacatggtgaaaccccatctctacaaatacaaaaattagccaggtttggtggcatgtggctgtagtcccagctgcttgagaggctgaggtggaaggattgattgagcctgggaggtcaaggctgccgtgagctgagattgtgtcactgtactccagcctggacaacagagcaagactgtctcaaaagggaaaaaaaaaggtatcacaagactctttagagttttattaagcatgtgaaattttgttgggttgggtgatagttacatttagaacattaaagcatccatattttactgttttggtttttctctaaacaagtatattaacttacgtctcttgatcattagtctattaattaatgcatccaggagggtttttgctccttaaagtttaacactaggcattgccacattttgcaaaactaagggacagtgctgaaatggtttaaagaatctggatttcagatcagagactgacttcagagtctgatttctgtcacttactctgtgggcctggagcaaattacttctccaaggacctatgaaatggatataatggtagctattgtacctggtgtgcatagcgggcattcaataaatgctagccatttcccttaatgaatcactgcccacaaatctggagtcctgggaaaactcaacaacatgcacgacactaaaggaaactgcagttgatctccgctctttagcagcttttcagcaattacaaagacacaatatatgagtttttgcatgttttgcatatgcttgtgaaaattatgtagtaaataggtgccaagtaaggtatgtagatagcaagtgctagtgcaatttataggtgccataatccctatggactgggtcagaaatggcctaatagaaggcagaagagaggccagttccaagcaggggcatagaacagaacaatctgcaagggagttgggagcatataccgctgggttaagacagtgagtgagaaaaggctggaaggcagacagtgctgggcaaaggagctggagcttgatcattgctgcatacgaaaatggaggcatttaaactgggactgagatgggactgagtgattaaattgctaccagtgttagttttaagagttgaaaagcttaatagtaaattttaataagcccatgaacttgattatggctacctttattttaaacaaggagaccttaatggacagaatcaagaaacagctacgtgaatgggatgaaaatctaaaagatgattctcttccttcaaatccaataggtatgaaaagttagtttcctgcctggagcctgggatgtcttgctataaaaaatagctttttcatggatgcgatccaatcatatcttctaggttttaagactgattaaaacattttaattctgaaaagcataatttcctttgagcagttgaaaaaaaatgagtattttaaaattaattgcaataaaatcctcatattctgtgagcactccaattttagacaagttttccataaaaagttcaaattgcaggaagtggctgtcatccaaaaacacttcctgtgtaaggactcctttccctgttcttcaaggtgcctttaaaagaagtgagtctagttccaggacttgccttaattatagatactctctttatctgtttataaggtatagtttagttatttttctagtctcttggcaaataacttctaacatggatttgagttcatgtttaacataaaaggattttaccaaaaaaagtataagaaaagcaattaaatttagagcttctgaaaagtgtatctttgacagctggtatatttttgtattgtttatacttgtataaaatgtgtaaccttaaagagaagggtttatttcaaaaggatattatccgatttgtaagttctctgatgcttatctgactcctaagtttaaaacttgaaaaaccatgtcttgaagatttttcttacagagtagctgcttgtcttcctattgatgatgtattgagaattcagctccttaaaattggcagtgctatccagcgacttcgctgtgaattagacattatgaataaagtgagtaaagtgaatatgtttttgatgcccatgttttattcaggctggagaactaggatgctctgttggggccaatggagctctgtatagagtccagtaatgtagtcatgcaattcagatttcaattgggatcttacaaacaaactcattgttttgtgtttgtcaaatatgaatacatttatcaacttagtgaaaaataacttgatttctgcatggaaatatccaaggttatatatcactattcctttactctagagaaggtcatttagttttatgtaaatatgtggcagatctcagtttcagtgactttcgtgctccatctttaaaagtgtttttgaatgcttggaaggaaaatgtgatattcagagagagcaatatctttataagtaagtttcttgatgatctatgtgattacatgataaagtgaatgccagtttttcctaccaataatttttctctcaaatcttttagtgtacttccctttgctgtaaacaatgtcaagaaacagaaataacaaccaaaaatgaaatattcaggtaaggtctttattacgtttttaatatacttgccttatcagaattataatgaagactgtatttctgttttccataaactttcctccagtaccttaaagttacaaacatttagcaaatgaaatatagggaattagctcacttttgctaagaccatcttccagattgggtactcagagcaacaatgcatgtcagggattattcacaggtaatgagcatggtaaagtaaaacaactgagaaattcttttccccctaattcttgttgacaatctatatattagactgtcttcaattaggccctaacatagatgcttcagaaattacatttcagtcatcagttttgccatatagggccaaagtaggacatgcttctgaacacatactgatgctctgatataacagtgtttgaaaatcattttatgacaaatccatcagttgtaaatcaagaaggtaaggaaactgctttctgcaaaataatcaactgccccaaaatgaccacacaggaccttgtcattgcacttacactctcagactcctttagaagcatttgagttttatattctttacaatgtctgtcttgaggagggttttaaaaacaagtactatttcctttgggtcatcacagaaaacatttagacatttagacaaaacaggcctgtctgccagctgtacccccaccccattttcatactaagatcctggtattatataaaactgaaggattaaaaactgtatagctcatacctcatttcttggtgaacttcaataaaattctaagcatttaataaaattagacttctcgttttgacgtgttctccatgttgattctttgttttagtttatccttatgtgggccgatggcagcttatgtgaatcctcatggatatgtgcatgagacacttactgtgtataaggcttgcaacttgaatctgataggccggccttctacagaacacagctggtttcctgggtaatattatggtggtggttgcttttttttttctttttttaccttaattgggcagaaaaatccagagtcctaagcagagttgccacaatctttataataaaaagtagacagacaaatgagtaatttgctacaaaaattagccgggtatgggggcaggggtctgtactcccagctgctcgggatgctgaggcacaagaatctcttgaacctggaaggcaagagtgttgcagtgagccaagattgtgccactgcagtccagcctgggtgacagagtgagaatctgtctatttaaaaaaaaaaaaaaatttatttaaatgtccttcattccacaaatagctagaaacatctgttgcactttttgtatcttttatcattgaatgaaaggaagaaaaggttgacaactgcagttgtcctcagattactgtatccagttaaatccaaaattgtttttttctgtcagtcatgtaattctgaaaatcagctgtcttatgacccagtagaactttatatctggaccatattctgtagtaatgtaaaaccggagaatgtttacaaagcaatgatagactaagaaggtgcagaacccattgaatcctgcttttcttctagtttgccttttgtttgtttgtttgtttgcttcagcttaatgattctctatgatcctgggaacctgttcagttccctcagctgtactatcttcagttttcaaagagggatgctaagaagggattacatgctactctggggttaggactatgtatcttggattgccctatcttacttggcaccctatgtgaggactaaaactagaatacatttgttactataaataaatgtggcatggtatacctagggaaaaaaataaggaaacagttgcaattacatggtttatcttaagaacaaaataccatggtttgtatttctggttgcattatctgacaatcgttcttattttagaatagtagtttttaaatatttattttttgagacgtgtccttcctggcccatccagtttaactcagacagaagtgcattatttctgcaggtaattgctgttttctaacttgactgcaatacaacaaaggaaaagccagtacaagttagaatgtggtgccagtacaagttagaatgtggtcttggcaaccagcaatttctataaagaaattcataagattactctttatttctatgcagtagaagaaaaatgtaaacatggcttaagagcataaaagtcatacatattacaaaattagaaaatgtttttagaaatgtttttaggtttcagggaactgtatggatcaaatctcaacttagaatctctaatccttagaatttgcctctaaagtctgtcttcatgataggtttatatgataggcttggagtacagaaatgtttccttagctgatatctttccttaatttcttaggtatgcctggactgttgcccagtgtaagatctgtgcaagccatattggatggaagtttacggccaccaaaaaagacatgtcacctcaaaaattttggggcttaacgcgatctgctctgttgcccacgatcccagacactgaagatgaaataagtccagacaaagtaatactttgcttgtaaacagatgtgatagagataaagttagttatctaacaaattggttatattctaagatctgctttggaaattattgcctctgatacatacctaagtaaacataacattaatacctaagtaaacataacattacttggagggttgcagtttctaagtgaaactgtatttgaaacttttaagtatactttaggaaacaagcatgaacggcagtctagaataccagaaacatctacttgggtagcttggtgccattatcctgtggaatctgatatgtctggtagcatgtcattgatgggacatgaagacatctttggaaatgatgagattatttcctgtgttaaaaaaaaaaaaaatcttaaattcctacaatgtgaaactgaaactaataatttgatcctgatgtatgggacagcgtatctgtaccagtgctctaaataacaaaagctagggtgacaagtacatgttccttttggaaagaagcaaggcaatgtatattaattattctaaaagggctttgttcctttccattttctttaacttctctgagatactgatttgtaaattttgaaaattagttaaaatatgcagttttttgagcccacgaatagttgtcatttcctttatgtgcctgttagtaaaaagtagtattgtgtatttgctcagtatctgaactataagcccatttatactgttccatacaaaagctatttttcaaaaattaatttgaaccaaaactactactatagggaaaagatgccaaaacatgtcccctcacccaggctaaacttgatactgtattattttgttcaatgtaaattgaagaaaatctgtaagtaagtaaaccttaagtgtgaaactaaacatgttctttgttcaaataatgtaaaatatctactcataattttaaagttctaaaaaggctgctttgccacctacctctttgcttatattcaagggtttagtgggtccttccttccacatttgtatgataactttcgttttattggtagtcctttgctactttaaaactaatcaggttaaatgtttactcaaatgtagtaatagtatgaggccaaaatacatgccttgaaggtggagtgaaatcagttgagtgtcacactgcatatttatgtaaatagagtaaatgaaaattcaagaatacttccattcaggatatgcccctgccttattttttctaaggtctacttttactactttaataattttgggtttgtgtgacttcactggtctggtttgttcctatagttcttacactgcactaaaacttacttactccaggaagttcctgtcagtagcatagtacctctctgtaggctgaactctaaaccagttgcaatgagttaccttttccctctgaaaagttaaaatttcagtatgtcccataccgtttactagcaaataaaattttctgatctgtaaaaacacacatatactatactactactgaaaatggttttacacatgacaaaaccagacctgatagctaaatctgcatactttctatacagaaatagtatgtattatatgacgttgggtctaaatctgtattttggcagtacttaaatattttaagtaagtatttcaaagtattattttataatgcatctaattactgacctgtatgcagtcatttctgaggctttcttgcatcatagcccctgtgacatttcctcttagaaatattacactctacaaaattgttttatcaaggtccaaaattactatttgctcatagagtacaaagatgttatgactggctacacagaaaggaaataaattatgaaatgtcagtatagcagctgaaattatagcagctgaaataaacagtttgtattatacattttatttacctgatgaaagcatttaggactcaaatctttagagaataaatctttagagaatatataataatagccatatccttttaattaataaaataacactttaaagacaggcatattaccattgtatatgacacctaatacacattgtcagataccacataaacatatttatcttccaataccaatgtttgttttattaaaacaataattaattaattaataggctcaatagtgaccctcaagttaatcccatgactttcccaggctctgcatgcataaagaaatcattgtgacagaaaaatatcaaccacatactgaagcatagcttgctagaacaaatcctgtacatatgaatgccagcaactggggacacatttagtattcacattttatgcaaacttacttggtcaattatttcttttttaagcacaggtttattttggaattcagataagaactgacacatcatagacagtcattgttaaggtaaccctgttatttcaattgcaaacaaacaataaacgttttttcttcaagacagttaccactttttaagatcttagtactaccctatgcaaaaacagttttttttaaaagcctgaacaggttaagatagataatagccaactatgttttctcaggtgaaactattccaaaagaactgtacatttcagtgatataaatcagatccagaaaggtggatctctgtttagttcttgaaatatataattcacaaaataagacccttgttgttctacagaggtcccctaaactgtcttttattctggtgtagtctctaaaacctcattaagagggaggggagaaaatttagtcttaccagaaatgctctgctttttagtagccatcagttttaggtcttctttatgtaactcagaagttcatctttttccatttggtaaccactttttttccactgttctcgcaactgttgtaatagagccccaatttcttttcctgaagaaatgcccacttttctgatgtcatggccacttacaggaaatggaggaatggaccactgctgcatttcctttaggagacagtgctctccttggtacttcagtagttcacatacacgagtagttgcatcaggttccctagactacgtgtcaaaatcaaacatttagtttcgtcacacatgaaaacatacacttacaatcttatcctaaaatttaaatactcaacataaattttttcatttaaaataagtaaaattcacagatttgtagatcttagttttaataaattaattctaaattcgtgacgatacttcatatttctgaccaagcctagtatatacttacatctataatgaagtcttgatagggtttcaatgggtctgaactatctgttgctttaattaaatctttcctatttttaactataaataagccaaggtttttctcctctttcgcgatcttcaacctcaaatccaat

SEQ ID NO: 1955 - DNA, 32191 bp, Homo sapiens
attgttgaagtcatatttcactggtttttataacatttatataaattatgttgctgtaatcacaaaacaactgtgataaacaagttggaaagaaaaaaaactagcttatgttaaaaacaaaactcagctgctgggagaagaaccagccactgcatatgcagtggaccctggccatgtttaaccaggtaaaggagagcattccttaatccttcaaggcaattcagacagtttgtactgcagactaattaacatgatctgtaagccaggggatcaataatgttactgtttttatcataatcaaatcttatacaatagttgggtaaagcatagttcttaattcagttacctataaccttgaagaatcagatttctaaaaatttctataggatggtatatacttttaccttcataatgtaattaacaagttatttgtgttcatgaatcaggtgaagaaaattgagattttgtttctaatgagctctaataataatataagaacacttgaccataatttgactatagtaaaattttttaacattttccgaagtcatgtagacaaattttctgagtatttctaatgagtttgcaggaaggaaataaagttagtagagtgagtctactattatcattaaattaaacttagatactttctaacacactcagttatttttccttctaataaataagtaaaatgtcagaatttcatccataatatcttgtggtcaaacagtggttattatgaaagactactttagcagtcttaagtataactaataaagcagagacttttaatatatttgactttgtcagtctgacagtgttatatactagcatttgaatatagttacatattctacatttcagaagctacactctaagagatagaatgcctcacaggaagatagctcatagatacaaccttcctgtttgcactagttcatgataagatgtttgcaattatgatattctcaagtagcattttggaaatgactttattatgacattttaaataacttttaagaaaaaatctaatttatagtttgatcctttgtacagttaaactcttaagaacgtgaaaaggaatgcacacagaaaggttgcatgtaactctctagtgttattttaattcatccatgtaaatgcattcttgatttttctcttcctttctctacttagattagatgacttatgagaaaggatagatgtaagagttaagcagcataagaagtggggggatagaagaattgggtgtcttaagaatgtttaagaaagtagaagtatcaagcagtagttggttgtatgttggtttttttaaaactttgtttcatttatagactctgtatttatctgaaatgtgtagatctccctttccattccacagtgacattgaagatccgtaccttaggttatctttggttttaactttggtatgattaatgaaataaaattattttctgaaagtttctgtatcttaacatcagtatttgatgaatatgtttaaaagataaaacttggaaaatcttggtatttaaaattatcactgtttagaaacttatagttttgagttagtcaatcttagaaatgaataccatgcttggttctctttattttagaatccagcaagctaaagtgcaaattcttcccgaatgtgtgttgccttcaaccatgtctgcagttcaattagaatccctcaataagtgccagatatttccttcaaaacctgtctcaagagaagaccaatgttcatataaatggtggcagaaataccagaaggtgagaaactaattttttatgcatcttcaaaaaatgaagacaggttgttttttttcctgttttaagaaagaaacacaactttcatgattcattacccagccaccttgtatggcaatattccagctacatttgatcctctaaaaattgcacaggcagctactttatgtaaaagcagtttacaaaagcaataaaatgtcacacagctgtaaggtatccttgttattatgcttatcagctatattaatcgcttttgatttttaattccatgggaaatgcttattaaactatgatcaaattagatgttcggctcttgagttataaacatccattatcttaaagaagggaggattcttttggggtagagtagtagtagagaagtagagtctgttttccttcttccaaaccagagagaaaggtttcttttgctatgtgttttaatgaaatacagttgacatcgcagaaattgacttgagactaggtgctctttaaaaatgttgcttgtttgggcactaattcctatgttatatcctttgactaaatcataattgtcatagggaaaaaaaattgagggagcctgtttctactcgtttgtgagatgtgcaattttaagtatagttaatatttataattgctacctaaagaaaaagattactagtttctaaatttagaataattgggctttttgagtttttttttttaatatggaaagacagtttccactgtaaccttaaaaattctctattaatcattcctttgttgagtggtgaggatttaatattttaatgtaaatacagaatcctaatttaatgtaaattattatggataattaatgaagtggacttatatactagtcactgtaccgaatttttattgttcttgcagtagaattcctccagttttcagcgaaaacttgtgcagaatgggcacttgatgggcatcagggttataaccaggtatctataagacttcctggtctttatctcagttaactgatctgtttcatggtacagtgtgttttgactagtgtttctaaggaagattctaataaggaagatataattagactgctttaagactcccaaacaaccttgaaactagtattttttaacgtttagtaatattgatactgcctttagttaacaggcagcttttgtgtagctgtattagtccattttcacgctgccgataaagacataaccaagactgagcaatttacaaaaaaagaggtttattggacttaaagttccacatggctggggaggcctcacaatcatggcagaaggttgaaagtcaaggaagagcaagtcacgtcttacatagatggcagcagggaaaaagaacttgtacaggaaaactcccatttttaaaaccatcagatctcatgagactcattcactatcacaagaacagcacaggaaagacctgcccccataattcagtcacctcccactgagttcctcccatgacatgtgggaattgtgggagttacaattcaagatgagatttgagtggggacacagccagatcatatcaccgtgcaatactttcttccccataccagatgcagacactttaaatacatgtttacccttgtttcttttaactgaactgtgagaaattttgctcccatagtcattttaaatgttactgttgaaataagtatgtcagtgatcactgtcagtatgtggcccccaaggagtagatttggaatatattaagtcatttagtgcctaaaagtatgtttggcactggtttgctactgaaatacgtggcaaggtaactgcatcaagttgttccctatgtgtcatctgaatattcacgtagtgatgtatttcatactagagattttttttcagggggtacaggcataccacggagatattgcaggttcagtttcaaactgctgcaataaaacaagtatcacaataaagttagtctcatgagttttttggtttcccactgcatataaaagttttattcacacaatactgtagtctatcatgtgtacaataagattctatctaaaaaacagtgtacataccttaaataaaaaaatactttattgctaaaaaatacaagcatctgagccttcagtgaatcataatcttttttgctggtggatagtcttgttttgctgttgatggctgctgactaatcagggtagtggttgctgaaggttggggtgactacagcaatttcttaagacagcaatgaagtttgccccacagattgactcttcctttcacaaaagatccctctttagcatgcggcgctgtttgatagcatttaagccacaacagaactttcaaaattggagtcagtcctgtcagaacttgctgctgctttatcaactaagtttatgtaatattctgaattctttgtgtcatttcaacattcacaacatcttcagcagtagatttcttctcaagaaaccactttatttgctcatccataagaagcaactcctaatccatgtttgatcatgagatcacagcaattcagtcctatctgtgggttccacttctaactttagttctctttttgtttctgtcacatctgcagttacttaactgaaggcttgaaaccctcaaaatcgtcatccatgagggttggagtaaacttcttctaaattcctgttaaggttgatattttcaccacctcccatgaatcatgattattcttaatggcacctagaatggtgactctttttcagaaggttttcaatttactttttccagatccatcagaggaatcactatctgtggcagctatagcctatgaaaaatgtatttcttaaataataagatttgaaagtttaaattactccttgatccatgggtcacagaatggaaattttgttaccaagcatgaaaacagcattaatctccttgtatgtctcccatcaaaacttctgggtgaccatgtacattgtcaatgagcagtaataattataaagagtcttttctgagcagtaggtctcaacagcaggcttaaaatattcagtaaaccattatctaaacagatgttctgtcatccagactttgttccatttactacagagcacaggcagagtagatttagcattcttaaagggccctaggatttttggaatggccagtgagcattggctttaacttaaagtcaccagctattagcccctgaaaggagacttagggactttctctggattaggctttggctcaacggaaatttgtggctggtttgatcttctgtccagaccattaaaactttctccatatcagtaataagactttttggctttcaccagagtagcatttcatattcacagctttgctgtttgccccaggaggcctagcgtttggcctctttcagctttgacatgtgtttctaactaagctttatcatttttagcttttgatttaaagtgagagatgcttgactactcttcttttcacttgagcacttagaagccattgtaaagttattaattagcctagtttcaatattgttgtgtctcaaagaaatagggaagcctgaggagagggagagagatggaggggctcgtcagtggagcaatcaaaacacatttgttaagtttactgtcttaaatgggtgcagtttgtggtgccccaaaacagttacagtaataacatcaaagttcactaatcacaaatcatcataacagatataacaatgaaaaagtgtgaaatattgtgagaattaccaaaatatggcacaggcaggtagttagcacatgctgttggaaaaatggcttgatagacttgcttgaaacagggttgccagaaatcttcaattttttttttgtttgtttgtttttaaaggcagtatctgtgaatcacagtatgcctgtattaagtatttgggtatatagaatagttcttcggcaccaagatggcttaaaaattcttaaccattaaaaatcctaaattaacgcttctttgcaaagttctaagtatagagtgagagcagtggtagttaattcctgactcaagtgctctgtacagctagttctgtgacctgcctgtaggatcctgcagtcttaaacctgaacttgggctaagcaagtaagactgctttttaaatttattttttatgtgagttactacttaaattcttcctgttctatggttaaagcatcttgtttacattacattccgaatttggcccatgcaactgggttgccactggcttaataagacaagaaaagatagagctgggaagaccaaagaagcacatatttgcctgggttcagatcctctgaatttttcctcttgtcttaattagcccttggttattttcatattcagagttgccaagggctaaagagacgatgctaaggaatgagaaggcctaaaaggttttaggtgatacaaataactccatcccatatacgtcaggttatctacagggttcccttgcttaaacgttgatagagtttcttaggttctgaaatttggaatctagatcactaggccaagagaaaccgctagctgatctattttggactccaggtgacctacaaactctgttctgctttagagagaccacttagagccattctgtgtgcatcaaaaaggaatctaacagggaaaggggatggcagatatctttggtgggaactccgtatgcagtgggaccatctgagtggtttggcatgctgcacctttagtgggacgctagcttaccatgagggctggattatgtaacagtgtttgtctttagacagatacaaggttcagttcattcctgtcttcatagagcttgcttgtatctgatttgtccatcccaccataatctgaagtactgcatatgtgtcttctgtctctgtgtctgagtagtagttaaaatggtcagagttgggagatgcttacataactaagctaactcaagctaataaggttgccgcgcacttttcctgcagaaaaggaacttaaagtatcgaggattgtagtcttcctgagatatattcaattaactttgaaactgcacacagcatttgccgtggaaacctaaacatctcaaatgacatgaaataaaattatttaagcttctggaagtgttctgtgttatctaccattctgacaaggaagcattagagaagattcagcacgtgtctctcatgattaaggagttaggccagtgtaattaggaaacactttcaaaacccactccatctagagacatttcttgttctggaatttgagctctgaaactgtttacttcttttcccatcacagtgcctttctctattcactggtttactgtagggggatttgagaatccccctacagtaaaaatcctcctcaaaaaaaaagaggaaattttgtttaaacctgtttggagtatgacttaaatgtttctaagtatattccctgcttgcccagaccatctgcttattcatatatcaaggcttactatgttaatcagaaaagagttgagtatgaaatgtaaagataagtcaaatgggaaacagatactaagaaagtaatgagtctcatctttctggcctctgttgaacttagccatggttgttcctgtttattgcgtagagcagggaggaactgagcatgaatttggaagggcaggggtctcatacgtaatctcccagattagtgtttaaatctcctcctaattttatctagatacaaatgttcttatttctttcttatacagaaggatacgtacctttttcttaacggtgtatcttataggagattcttttgtattagtttatagagcattgctcattcttaaagctgcttggaattcttttgtatggatacactgtataaccagtcccatactgatgatagatctgtactaaataacatgtacaaatgaccttttatataggtaaatatttatgataacttttaaagagtgaggttattggcttacagggtaaatgcatttataattctgtcagttttaaaaataattttgaggccaggcacagtggctcacgcctgtaatcccagcactttgggaggctgaggcgggtggatcacaaggtgaggagttcaagaccagcctggccaaaatggtgaaaccccgtctctactaaatatacaaaaattagccgggcatggtggcgggtgcctgtaatcccagctacttgggacgctgaggcaggagaatcactggaacccgggaggcgagttattttcaaaatacttaaggtgtttgtacttatttttattgtttcatcatggcctgacaggcaatgtagtatcaaacctgatgtttgctgatctgataagtgaaatatattacattgaaggttcaatttgaatttctctgagagcaagggtaagcattttgttgtaagagcagtttgtgtttcctttctgtaaagtgtttgcccatttttctacggcttgttgatttcttgggagttccttgtaagctttatagtctctgtaattaatgagttccaaacatttttcctagtttgtcttttgtcttttgtttttggtgtggtgtgtcaaacagaactgtttttttgttgttgttcttacatagtttaatttttaatgcttctgtattctaaatcatagccaaaaatgacgttcccatgcaaaggaatgtctcatgttttctttggatacttgctgtggtttcattacttttccgtggaaagctctgatccttgtgcagttgatcctgatataaattccactttacttttttccagatggctccctattgtcctactaccactttttgaatagtccatattttctcccattgatttgagatgccaccattgtcacagaccaaattcatatgtttattttacttttcttctcttttggtctgcttgtgtgccatcatcatattgttgttaatgttggcactttatactttgtgtaaataaaaatagggctggtaagcccctcactgcttttttgtcaagcttttcagtgactaccattgattaacatttccttgtgaacttgagaatctgtttcaccttgttccaggataataatcgtaagaacagtaacatttattgactatttttatataaagaagaaaagtcttgaaatcttaggctatgtatagtcaggtgcttcctcagaaagactggtcatttcccaggcatacatcttgtatgtacacttgtgtatctgccattagcgtataagcctcaggagtaggaaagagcttatcattccatcccagttcttattaccatgtaggaatttggttcatgaaagaaggaaacaaaaactggtaactttttaattatttatataaattatttctgtcatttacattgctgattgtaataggatttaacacaataagtgaccacttttagtcactatataaaggaagtcagtggtagtgatttactatttatgtttagcttttcacattactctttccattttcattgcacttcaaagactcacttaaatggagtttcacatgttttgaacattctacgttgttgggaggcaaagccgaagccatagttatgaggcttaagaatggaggactgtgatagattacctccaggtaacagattcgttttaagggcttttatgcctgctttcagtagtaaatcctgttcccagagtgaatactactctgctggagaatccgtcattggtcacttttaagtgcctaaactttttggctagtattaaaattttcttgaggtataaacattttatgacatcaatcatggtgttgatatatttaaagaatgcctataaattgctagaacttatcatccattttacccagatataagacaggagcctttcctattgtgccagaaagctaaatgggactcttaaatttgaggatgttgaaatgtcttaaactttggcagttgctctgtaaaagctagctagctaatctgttctggtatgtgtctcttcagtgtgtctaattgactaacacacatcacaaatattaaggatgtattatgcatatttgaatctgtcaggatgctccagataaagaattttagaggtcttctgactctgaaaagaagctacctgaaactgtagcttgctcatgggcatggtggcagagtgaatgcctgatccagtgcattgctcttaatatgctagtgtgccacattttattctctttatacttgaaatttacatattatttcagattctttttcttgacatgggtgccaaatgaaattacacttttgtactacacttttttacatttcttttgtattacaaaagtgaccattctgatatgtgaagtatattttaataactgaatgaggagtgtgtcagcgaaactaaaactttcagttgggtctttgtcattttgtaattctaagaatatatagcttcttctctctaaaatataagctccacagggtattgaattttgttggtttttctttcattcactggcatagcctaaatgtataaaaatagcctgacacatgttaggcactgtattagtctggtctcacgctgctaagacgtacccaagactggggtaatttataaagaaaagagttttatttgactcacagttcagcatggctagggaagccttaggaaacttaccatcatggcagaaggggaagcaaacatgttcttcttcacatgatggcaggaagaagtgccaagcaaaaggggaaaaaccgtcttaataaaaccatcagatctcgtgagaactcactatcatgagaaaaccatggcagtaactgtccccatgattcagttacctcccaccagatccctcccacgacacatggggattatgggaactacaattcaagatgagatttgggtggggacacggccaaaccctatcaggcactcacaatatttgttgaatgaatgatggttagagtcagactccctgtatacagatcctagctccttcctatttactgactctgtgaccttgagcaagttataccatccttgtgtgcctctgtttccttactttagaatggagataataaactactaaccttagagtattcttacaagaaatgtgaaattcttggcacaatactaatggttgccattgctgttcctgaagattcagagctacttgatgtgctcttggtagtattttcttaaattctgtaactggactgtgacaataatcttaccattaggtatttagtcttaaaagtgagggacaacttattggagagtacctgaagggtctcatggtctgactcctcaggctttaaccactaccagagcacacagtaggaggccatctcagatcacctttggcaggggtccccaaatcctggcccacgaaccagcactggtctgtggcctgttaggaaccgggacgcacagccggtggtgagtggtgaacgagcaagtgaagctgagcgccacctcttatcagatcagtggcagcatagattcttataggagcgcaaaccctattgtgaactgcgcatgggagggatctagactgcgtgctccttatgagaatctaatgataaatgtaatgcacttgaatcattccaaaaccatcctccaccccatctttggaaaaactgttttccatgagactggtccctggtgtcgaaaaggttggggacggctgatctttgcatagtctcaaatataaggattatattaagccagaaatgtttctcattaaggaatcctttgttttgagctgtaggtcgtgttttagaacaagtctgtcctcttccatatggcaactcctaaaatatttgaaaaccagtgtgtccacttgagagacagctctaaactgaacatctctggtaacaagacattccctttgataataaaagttcccatatttgaacagcagggaatagaataacattgtctcatagattctagtcttctgttaaaaccgcagttacttttgcaccaaactaacatagctagaataggattggagtggcggggaagtcgagggtgtgagtggtgtagcacattgtacagttgcgtagtacaattccagctgtcagctcagtcccgagtcccttttatgtgtgctgtgttcccacgtttcctgcagatcttactccggcacttgcaagatcaaatgactaggtatgaaacatacctagggtaagtatcattcagcgtatgaaacatacctagtcatttgatattgcaggtgcaggagtagggtcttcctcttgttttgttcaatgttaccttgtttttcttgttctggtctgttaaaagtgccttttgatctaccttattccttttctctctcactttcatgtgtcatgtcacatgtcaattaacattttatttacagtgaaattacaaagatttgtacgtatgtaggttttgttttgagaaaaatgtgataattctttatattctgctataccttgttctttgatcacttgcagagcattccttgatataaacatattctaatgtatttcactctatttttgattgatgtttaggttgtttgcaatttgttgctattagcactgctgcagtgcatcccttcagtaatatttttgtgtcctatagaccatttgcttctctttcaaaaattttgtggttacttttgcagttatgtttccaaacgaactttaaattatacttataaattccattctcactggtattgcactgaatatgtaatttgaggactgacatcttaacagtattgagtctccccctcaaatactgaaattctacaatttctacaattcacatttctccccctcaaatactgaaattctacaatttctacaattcacaattcaactgaaatttctacaattcacatttttatatggacttaggcatgctcctgtttggatttcagttacaattagaagtgataaataatcggtttcccctctccttgagttttatgaaatgaggaacttcatcatgaagtctcaagtaaacgaacattttatctttcttgggattctatcacttcttaatgtttgcccttatagtgattaagctgattctcatttaaagtttttacacaaaaacagtttggattatatcttgaggttttcacttcagatactggacaagtaattagtataaaggcaactaacatggtcataatagaagtatggtgtttactctcaacatttatcttcccaaagttgtcttcagcattgaaattttaatgtttgacctttttaaataggaatgaagattctagttacaatatatatttgaaggatataggaagcatgatttcacacttcatagatagtcacgtcatgggattatctacaaaattttttatctttttaaaattagatgttttcctaggccaaaatcatttttcagatgttgctcattccagcattagaatctttattctgtggggttttttaagtgcctttttgttttgttttcagagaaagtttcattgtgcaaatctaacttcatggcctcgctggctgtattccttatatgatgctgtaagtaacttaccttaaatttactttatatgtggtaggccatgtcataattaagggtcattaaaaaacaaaggtttagtttttccagtttctagtgccttataacttaagatatcgttaagagtggtggctcacacctgtaatcccagcactttgggaggccaaggcagggggattgcttgaagccaggcattcaagaccagcctgggcaacatggtgaaaccccatctctacaaatacaaaaattagccaggtttggtggcatgtggctgtagtcccagctgcttgagaggctgaggtggaaggattgattgagcctgggaggtcaaggctgccgtgagctgagattgtgtcactgtactccagcctggacaacagagcaagactgtctcaaaaggaaaaaaaaaaggtatcacaagactctttagagttttattaagcatgtgaaattttgttgggttgggtgatagttacatttagaacattaaagcatccatattttactgttttggtttttctctaaacaagtatattaacttacgtctcttgatcattagtctattaattaatgcatccaggagggtttttgctccttaaagtttaacactaggcattgccacattttgcaaaactaagggacagtgctgaaatggtttaaagaatctggatttcagatcagagactgacttcagagtctgatttctgtcacttactctgtgggcctggagcaaattacttctccaaggacctatgaaatggatataatggtagctattgtacctggtgtgcatagcgggcattcaataaatgctagccatttcccttaatgaatcactgcccacaaatctggagtcctgggaaaactcaacaacatgcacgacactaaaggaaactgcagttgatctccgctctttagcagcttttcagcaattacaaagacacaatatatgagtttttgcatgttttgcatatgcttgtgaaaattatgtagtaaataggtgccaagtaaggtatgtagatagcaagtgctagtgcaatttataggtgccataatccctatggactgagtcagaaatggcctaatagaaggcagaagagaggccagttccaagcaggggcatagaacagaacaatctgcaagggagttgggagcatataccgctgggttaagacagtgagtgagaaaaggctggaaggcagacagtgctgggcaaaggagctggagcttgatcattgctgcatacgaaaatggaggcatttaaactgggactgagatgggactgagtgattaaattgctaccagtgttagttttaagagttgaaaagcttaatagtaaattttaataagcccatgaacttgattatggctacctttattttaaacaaggagaccttaatggacagaatcaagaaacagctacgtgaatgggatgaaaatctaaaagatgattctcttccttcaaatccaataggtatgaaaagttagtttcctgcctggagcctgggatgtcttgctataaaaaatagctttttcatggatgcgatccaatcatatcttctaggttttaagactgattaaaacattttaattctgaaaagcataatttcctttgagcagttgaaaaaaatgagtattttaaaattaattgcaataaaatcctcatattctgtgagcactccaattttagacaagttttccataaaaagttcaaattgcaggaagtggctgtcatccaaaaacacttcctgtgtaaggactcctttccctgttcttcaaggtgcctttaaaagaagtgagtctagttccaggacttgccttaattatagatactctctttatctgtttataaggtatagtttagttatttttctagtctcttggcaaataacttctaacatggatttgagttcatgtttaacataaaaggattttaccaaaaaaagtataagaaaagcaattaaatttagagcttctgaaaagtgtatctttgacagctggtatatttttgtattgtttatacttgtataaaatgtgtaaccttaaagagaagggtttatttcaaaaggatattatccgatttgtaagttctctgatgcttatctgactcctaagtttaaaacttgaaaaaccatgtcttgaagatttttcttacagagtagctgcttgtcttcctattgatgatgtattgagaattcagctccttaaaattggcagtgctatccagcgacttcgctgtgaattagacattatgaataaagtgagtaaagtgaatatgtttttgatgcccatgttttattcaggctggagaactaggatgctctgttggggccaatggagctctgtatagagtccagtaatgtagtcatgcaattcagatttcaattgggatcttacaaacaaactcattgttttgtgtttgtcaaatatgaatacatttatcaacttagtgaaaaataacttgatttctgcatggaaatatccaaggttatatatcactattcctttactctagagaaggtcatttagttttatgtaaatatgtggcagatctcagtttcagtgactttcgtgctccatctttaaaagtgtttttgaatgcttggaaggaaaatgtgatattcagagagagcaatatctttataagtaagtttcttgatgatctatgtgattacatgataaagtgaatgccagtttttcctaccaataatttttctctcaaatcttttagtgtacttccctttgctgtaaacaatgtcaagaaacagaaataacaaccaaaaatgaaatattcaggtaaggtctttattacgtttttaatatacttgccttatcagaattataatgaagactgtatttctgttttccataaactttcctccagtaccttaaagttacaaacatttagcaaatgaaatatagggaattagctcacttttgctaagaccatcttccagattgggtactcagagcaacaatgcatgtcagggattattcacaggtaatgagcatggtaaagtaaaacaactgagaaattcttttccccctaattcttgttgacaatctatatattagactgtcttcaattaggccctaacatagatgcttcagaaattacatttcagtcatcagttttgccatatagggccaaagtaggacatgcttctgaacacatactgatgctctgatataacagtgtttgaaaatcattttatgacaaatccatcagttgtaaatcaagaaggtaaggaaactgctttctgcaaaataatcaactgccccaaaatgaccacacaggaccttgtcattgcacttatactctcagactcctttagaagcatttgagttttatattctttacaatgtctgtcttgaggagggttttaaaaacaagtactatttcctttgggtcatcacagaaaacatttagacatttagacaaaacaggcctgtctgccagctgtacccccaccccattttcatactaagatcctggtattatataaaactgaaggattaaaaactgtatagctcatacctcatttcttggtgaacttcaataaaattctaagcatttaataaaattagacttctcgttttgacgtgttctccatgttgattctttgttttagtttatccttatgtgggccgatggcagcttatgtgaatcctcatggatatgtgcatgagacacttactgtgtataaggcttgcaacttgaatctgataggccggccttctacagaacacagctggtttcctgggtaatattatggtggtggttgcttttttttttctttttttaccttaattgggcagaaaaatccagagtcctaagcagagttgccacaatctttataataaaaagtagacagacaaatgagtaatttgctacaaaaattagccgggtatgggggcaggggtctgtactcccagctgctcgggaggctgaggcacaagaatctcttgaacctggaaggcaagagtgttgcagtgagccaagattgtgccactgcagtccagcctgggtgacagagtgagaatctgtctatttaaaaaaaaaaaaaaaaaatttatttatatgtccttcattccacaaatagctagaaacatctgttgcactttttgtatcttttatcattgaatgaaaggaagaaaaggttgacaactgcagttgtcctcagattactgtatccagttaaatccaaaattgtttttttctgtcagtcacgtaattctgaaaatcagctgtcttatgacacagtagaactttatatctggaccatattctgtagtaatgtaaaaccggagaatgtttacaaagcaatgatagactaagaaggtgcagaacccattgaatcctgcttttcttctagtttgccttttgtttgtttgtttgtttgcttcagcttaatgattctctatgatcctgggaacctgttcagttccctcagctgtactatcttcagttttcaaagagggatgctaagaagggattacatgctactctggggttaggactatgtctcttggattgccctatcttacttggcaccctatgtgaggactaaaactagaatacatttgttactataaataaatgtggcatggtatacctagggaaaaaaataaggaaacagttgcaattacatggtttatcttaagaacaaaataccatggtttgtatttctggttgcattatctgacaatcgttcttattttagaatagtagtttttaaatatttattttttgagacgtgtccttcctggcccatccagtttaactcagacagaagtgcattatttctgcaggtaattgctgttttctaacttgactgcaatacaacaaaggaaaagccagtacaagttagaatgtggtgccagtacaagttagaatgtggtcttggcaaccagcaatttctataaagaaattcataagattactctttatttctatgcagtagaagaaaaatgtaaacatggcttaagagcatacaagtcatacatattacaaaattaaaaaatgtttttagaaatgtttttaggtttcagggaactgtatggatcaaatctcaacttagaatctctaatccttagaatttgcctctaaagtctgtcttcatgataggtttatatgataggcttggagtacagaaatgtttccttagctgatatctttccttaatttcttaggtatgcctggactgttgcccagtgtaagatctgtgcaagccatattggatggaagtttacggccaccaaaaaagacatgtcacctcaaaaattttggggcttaacgcgatctgctctgttgcccacgatcccagacactgaagatgaaataagtccagacaaagtaatactttgcttgtaaacagatgtgatagagataaagttagttatctaacaaattggttatattctaagatctgctttggaaattattgcctctgatacatacctaagtaaacataacattaatacctaagtaaacataacattacttggagggttgcagtttctaagtgaaactgtatttgaaacttttaagtatactttaggaaacaagcatgaacggcagtctagaataccagaaacatctacttgggtagcttggtgccattatcctgtggaatctgatatgtctggtagcatgtcattgatgggacatgaagacatctttggaaatgatgagattatttcctgtgttaaaaaaaaaaaaaatcttaaattcctacaatgtgaaactgaaactaataatttgatcctgatgtatgggacagcgtatctgtaccagtgctctaaataacaaaagctagggtgacaagtacatgttccttttggaaagaagcaaggcaatgtatattaattattctaaaagggctttgttcctttccattttctttaacttctctgagatactgatttgtaaattttgaaaattagttaaaatatgcagttttttgagcccacgaatagttgtcatttcctttatgtgcctgttagtaaaaagtagtattgtgtatttgctcagtatctgaactataagcccatttatactgttccatacaaaagctatttttcaaaaattaatttgaaccaaaactactactatagggaaaagatgccaaaacatgtcccctcacccaggctaaacttgatactgtattattttgttcaatgtaaattgaagaaaatctgtaagtaagtaaaccttaagtgtgaaactaaacatgttctttgttcaaataatgtaaaatatctactcataattttaaagttctaaaaaggctgctttgccacctacctctttgcttatattcaagggtttagtgggtccttccttccacatttgtatgataactttcgttttattggtagtcctttgctactttaaaactaatcaggttaaatgtttactcaaatgtagtaatagtatgaggccaaaatacatgccttgaaggtggagtgaaatcagttgagtgtcacactgcatatttatgtaaatagagtaaatgaaaattcaagaatacttccattcaggatatgcccctgccttattttttctaaggtctacttttactactttaataattttgggtttgtgtgacttcactggtctggtttgttcctatagttcttacactgcactaaaacttacttactccaggaagttcctgtcagtagcatagtacctctctgtaggctgaactctaaaccagttgcaatgagttaccttttccctctgaaaagttaaaatttcagtatgtcccataccgtttactagcaaataaaattttctgatctgtaaaaacacacatatactatactactactgaaaatggttttacacatgacaaaaccagacctgatagctaaatctgcatactttctatacagaaatagtatgtattatatgacgttgggtctaaatctgtattttggcagtacttaaatattttaagtaagtatttcaaagtattattttataatgcatctaattactgacctgtatgcagtcatttctgaggctttcttgcatcatagcccctgtgacatttcctcttagaaatattacactctacaaaattgttttatcaaggtccaaaattactatttgctcatagagtacaaagatgttatgactggctacacagaaaggaaataaattatgaaatgtcagtatagcagctgaaattatagcagctgaaataaacagtttgtattatacattttatttacctgatgaaagcatttaggactcaaatctttagagaataaatctttagagaatatataataatagccatatccttttaattaataaaataacactttaaagacaggcatattaccattgtatatgacacctaatacacattgtcagataccacataaacatatttatcttccaataccaatgtttgttttattaaaacaataattaattaattaataggctcaatagtgaccctcaagttaatcccatgactttcccaggctctgcatgcataaagaaatcattgtgacagaaaaatatcaaccacatactgaagcatagcttgctagaacaaatcctgtacatatgaatgccagcaactggggacacatttagtattcacattttatgcaaacttacttggtcaattatttcttttttaagcacaggtttattttggaattcagataagaactgacacatcatagacagtcattgttaaggtaaccctgttatttcaattgcaaacaaacaataaacgttttttcttcaagacagttaccactttttaagatcttagtactaccctatgcaaaaacagttttttttaaaagcctgaacaggttaagatagataatagccaactatgttttctcaggtgaaactattccaaaagaactgtacatttcagtgatataaatcagatccagaaaggtggatctctgtttagttcttgaaatatataattcacaaaataagacccttgttgttctacagaggtcccctaaactgtcttttattctggtgtagtctctaaaacctcattaagagggaggggagaaaatttagtcttaccagaaatgctctgctttttagtagccatcagttttaggtcttctttatgtaactcagaagttcatctttttccatttggtaaccactttttttccactgttctcgcaactgttgtaatagagccccaatttcttttcctgaagaaatgcccacttttctgatgtcatggccacttacaggaaatggaggaatggaccactgctgcatttcctttaggagacagtgctctccttggtacttcagtagttcacatacacgagtagttgcatcaggttccctagactacgtgtcaaaatcaaacatttagtttcgtcacacatgaaaacatacacttacaatcttatcctaaaatttaaatactcaacataaattttttcatttaaaataagtaaaattcacagatttgtagatcttagttttaataaattaattctaaattcgtgacgatacttcatatttctgaccaagcctagcatatacttacatctataatgaagtcttgatagggtttcaatgggtctgaactatctgttgctttaattaaatctttcctatttttaactataaataagccaaggtttttctcctctttcgcgatcttcaacctcaaatccaattttgtgacatcatcttgtactttgaataatgaggccaaaagagtcactggctttggtgaaaaaccatcaacatttttactgactttgtcaaattcttctaaacttgcattagcaggtaaacctgtagggacaaaagcatttttcacctgtttttagtggggataaaaaaccactcatatcctaaaccttgccaccgttttagtatccagaaatgctttgtcactaggatacattatataggttcagtctgatgttccaacttaaaggcgaaccactaatatattgttattctctcccctgtcaccttcaaaacctctaaaatgttcttgtttccattaaacctacatcaagaggtccaggggtagtggtgacagtggtgtcagactcacaaggcatactctttctaatcacaaattcctgactttacactgatacaagatccaccccccattcagtaatgttactgaaatttgaaatatgcccaagcttaccgaagtgtgataaaccatataatcccactattctctgtgaaaatgaattacaacgtttactgaacaatttctgtgtacaagtcactcttctaaaagagctttacatgtattaactcactgaatccttttagctttcctattagatagaggctacattacttttaaaccgcttttttgggttagaaactaacccaagttgcaaagactagataaggggctgagcttccttcaaacctaggtctgactagagactactctacaagcaccacaagctgtctttgagctcttccctactcacgacaaaacttaccccataacccaaactttgtcttattttaaaatactccatttctccaagaattcttcaaccaaatgagtcaaacattttttccttatgaaatctgaaaccagatatttcactgccaaaaattcaaacactttataacttgctctcacctatataaggagccacatcaagatcatagataaggtgaatcaaatgatttacatggttaccaacaagaatttttttcagttccacccaaatcctttctcctgatattccagccaagccttttgcattttctgcaattgcttccaaagtctcaggatcatggtcaccaggtttgtctacaattctcccataaaacctacaagacaaaatcttcacagggtattacctctatattggcatatcacaagcaaaatctgtttttcatttttattggtactatcccatacatctgcttaatgaaaacaacatataattagttaggtctagaagggaccttagaaagcaactggtcatttctccacctcctctttcttttcccagataagaaaacccaggatcgaataaaatataagtagcctttttgaggttagcaagaactaaaacttcaaggtctccacctcacttccaaattactgactcaagacattccgaatggtcatcaaatgcaattcctgaattggcacttatactagatgaaaaaaaaaacagcattcttgtaaaggcagcaaaccaaaacaagactgcagtgccttaacagagtagtctgaattcctcaaagcttgcctgtctgtacacattagtactttcaaggaaaaccttcaaatacgactcatctagttgcgcaccctggagtatatttcgcggaatcttagaactggaagccctaacgtgcatgtgtttccctctcatgcccttaaaattctaatgaattcatcagcggtccaaagtgatgctaaataagtaaattaatgctaaatctggattagtgatacaaatacagctaagtcttaatctatgttctattatttataagacagactacaaatactcaagtttagagaaactacattgacaaaatatccatgttctgttatagaatattctgagagcaatcccaaccagtgaaaaatgaatattacttgacataaactagccaattcggatagttttttaaaaaggttagtgtgtgacatttaaacatcattgctacccacaaaactagtcatgcgtttcatatttaccaagtttatccaagatcttctttttttttttttttttttgagatggagtctcgctctgtcgcccaggctggagtgcggtggcacgatctcggctcactgcaagctccgcctcccgggttcccgccatcctcctgcctcagcctcccgagtagctcggactacaggcgcacaccgccatgcctggctaattttttgtatttttagtagaaatggggtttcaccgtgttagccagcatggtctcgatctcctgacctcgtgatccacccgcctcggcctcccaaagtgcggggattacaggtgtgagccaccacacccggcccatccaagtttcgattatgtctttatgctttgattctttaaatcatataacaggtatttcttttcaccaaaatcattttgttgtgaaccatcaccgatttccatgactacctaaaaccgtaagctgtatgaaggggaacactttcactcgttcattaccacgtttaatgcacctaacacagggattgacctgtggtaagcattcaaacatctgtgtaattaataaatcaatggaggaaatatcaatcaaaaagaaaaatggacatttaaaaagatgacttaaaattgtaggaaagatgacataaagtatatgtgcgttctgggaatgaaaatacaatatgaagtagctaagtaattttcactcataagtcatagggtgctaggtctccactggagacagacatttgggatgtcaccattttgtacactgacctgctgtgggtttcgtatgaccactgttatgctctagtcatgatattaaaactatcattttttatttttaaaaattcttacctgaagtatcttaaaattctaagataatcctcttgtattctctgtttagcatgtccaacaaatctaactttcttattttttaaatcttcataaccattaaagtagtcaaataaagtgccatcaaaacctattcattagaaaaggagggagaaaaatcactattggcaaataagaatttgaaaacacaagaaaatcagctaaacactatcacaaacagtaaaaattcagcagagtgaacagttattaaaacacatacgtattcatacatatcaactatcaaatggaagacaataaaagactgtcttttagtctgtttagctgcatttacaattgcaactaaaaagataatccaagaataaactaaacaagaaatatgcaaaacttgtatgaggtggagtggagccaacaagacaccatacaagctaattttcacaatatgggaaaataatagccaaaataaaatggaaaaaatacgtaacaggattaacagaagaaacgaggaaaatatttttaatcttggaatctttataatcttgaagatctttcaaactcagcaagaaaacagaaaacgcaacacaaaaacaacaggattttcgaagaaataattgaatgacataaaaaatgaaatatgcctgtatggcagaaactactatcacacacaaagtcataagtgacatttttggaaaaatatatgtaagtccatattttaaaaatggctaatttccataatatataaaagttctaataaaaaggccacgtaaatagaaaaataggctacctataaaggaaatatagaaatctctttaataatgaagattttcaaccttagtcataaatcctttttttgttctttgaggcggattctcactttgtcaccctgggtggagtgcagtggtgcaatctcagctcactgcagcctcccaggttcaggtgattctcctgcttcagcctcccaagtagacctgccactacacacagctaatttttgtatttttagtagagacaggtttcggcaagtgggccaggctggtctcgaactcctgacatcaagtgatctgcatgcctcagcctcccaaagtgctagggttacaggcataagccaccatgcccggccagtaaatacccatttccaagataacgtctttcagatcggcaacgatgcaaacacttgataacagtgttagcaagggtgtggttaaacgggcagtcctgttcattacagatcaggagacttcactgtagagcctttaaaactttgtgaattttgaaccatgttaatctattagccattcacaaaaatggtaataaacaaatgttctcatatgttgaacgaaaaaagtgacataaaactaattttatatatatgtacataaaacctcaagtattaattagtagagtgaccacttcatactggtttgcctgagacattcctagttttaaagttgaaaatcatacatccaaggaagtacttcaagctcaggcaaactaagacagttggttaccatggagacttaaaaaaatagaaaaaggaatttagagccgaaacacagacaccattcagctcaccaaatggggaggtcagtgatctatgagatacttcactctgtagcattacagaaaagaggcactgacaactacttatcaaaaatacctcttggctgtgtttgaacttgaatgttctttgattatcccaaaagcaacagtacattggtaagttcacacttaatgcttaactcttccgaagctgttaatagttttatatgcatagtaacttttaaaagggaaccatcttgacatacatggcaaatttcgaaggctccagattcaaaaagacataaaagaaaatgataaaaagaaaatatgtaaataggcaaaaatatgatcacaaagtagcaaataatatggtatatccatcttggtgttatttctcctaatgaagagacttgtaaccgtccctggggaacctaaaggcaagatcaaaatttggaggaaaaaatcataggaatatgatcaaagcaaaaataagcgtttgggaagcaaagtaaccaaccataaatgccagaactatgaatgcttgatccaataaggcttggaaaaagccaggatagaaaactacacaaagcttagtaagcatcatactggtgtgtattttgttttgctctgaatatcatccttttaaaatacagtaaataaaaatatgaaatatggttgagttgcagggaataatgtagtggttaagaatgtgacctctggagtcaggctgcctgagttggaattctgatcctacactttacaagctgtgcaactttgggcaagttaccatcggttaaatagcagtatctgcttcgcagggttgtcaggagattaaatttacataatgtgctcagaacagtgcctgacatgttataagggttcagtaaatgtcagaaaatgatagtaccaataggaacagcttttattttataaactaggacactgaaaaagagtattagtttctctctttcagtatgcttatgagaagccagttagacaagactctatattgcactatttggagcagcttcctctatgagtaaatatgagaataaataaatacctggagctctgactacattaactgagagaaaaatgcaccaattgggctctctatggtcatatattgcctaggccttggaaacaagccaaaatcatggttctctgtgacttaaactaagttacttaatatctctcagtctcaagtttcctcttctatcaagtgggcttaacatactttatgaagtttttctgagagtttaatgaaataaagtatatcaggtacccaatgttgtacctagaacccagtaggtaccctagaaattgtatctgtcattactgtaatcagcaagagatgccaccttagcttataaacttcttgcccatctatgcatgaagcaaatcctattacttcatccttttaccactactattgctacaaactaggttatgaacagtggatgtttcatccttttttaatccaaaatcttaaacataaagggcttgtcttaactttaaagtacaacatatgatgcatcagtaatgtatcaaaacactaacctaattcgtatctagcccccatataattcccagtgctttcattaaacaaaaaagttaagctgaaataaataggtttcatcttacataccaactctgattattgatgattcctagaatacaatgctaaaaaagaatctgaggttgtgtgtaggctcagcagtaaaaagtgctgaagtcattcaccattgtttgccagggaagcagaagaaagattgaataaacatgcatgaaagatagtgcaaaggaaaaagaatgatcctgggtgtgtgtgtgtgtagatgtgtgtggagtatgtacatgtaccatgtgtgtgtgcacttctcttccctgaaatcatgtttatatgcagttaagaagttagcactgactgagtgtgtacatgtgtcaggcactgttctaagcatttacaattaactctcttaaacctcacaacagctgtacaaaggaagccaatattaattaacgtttttgttttgtggctagtgagtgacggagtcagaatttgaacccagggattttggctccagagtctattctttttttttgagatggagtctcgctctgttgcccagactggagtgcagtggcacaatctcagctcactgcaagctccgcctcccgggttcacaccattctcctgcctaacagctgggactacaggcagccgccaccacgcccggctaattttttatatttttagtagagatggggtttcaccgtgttagccaggatggtctcgatctcctgaccccatgatccgcctgccttggcctcccaaagtgctgggattacaggcgtgagccaccgtgcccggccgagggactattctttgaagcaatctgctaaaccatctcttagaagaaattaatgcaacttctcaagttgaagaacatttccagaatgtaggttttacttgaaaagaaggcattctgatagactcacaatatggttttatctgcaaatattacctaaaaacatagaatttatagtgagatctctgcgttccgcatctttctgccagtcagttgtaaattctacctcagcatgtcttccatcagtggtgacatcaatccgtagtgtagtaatctcaaaattttcttcatgaagctgcaattaaatacatggggtttttgttgtcatttaaattaggttttcatactactgaattgaaaaaaataagtttttgtctttataaagggatggtactataagccctgacagttatagtctttttaacgtcaactaccatacctaaacattgaaacagaaagatatccacattattcaaaaacagatcaaaagactgatttttttaaaaaaatatccatcatgattaaaaaagatgagtttaacacacaaacatgtcacctctgccaagtgatgtggagaaactccacatcaaactcaaaactgttcttcaatttcaaatcaagctattatcagaaatatttttaatagctccagtttgcaaagaggtgaatgtcaatttatggaacatatgccattgagcaaaagactgataaagaataagtacagttaacagatcttgcaactcccttactgataatccccagtgaaattaaaataaaggctgggggtggtggctcatgcctgtaatcccagcactttgggaggtcaaggcaggcagatgacttgagctcaggagttcaagaccagcctgggcaagatggtaaaaccccatctctaccaaacatacaaaaaaaccagccaggtgtggtggtgcatgcctgtggtcctagctacctgggaggctgaggtgggaggatcgctagaccccgggaggcagaggctgcagtgagtcgagatcacactgtgcactccagcctaggcaacagagtgagaccctgtctcaaaagagaaagaaagaaattaaaataaagagttacctctatcttgggaagacagactacctccagctggggaagctgagtaacttcatgatagggtggcgtctgtgccaagccttgaaaaagcagcagggttcgtacatgcaggtgtggtaggaaaacttcaaatgaagagaagagatgaccaaaggcacggtggaggaagaggaatatatgtaaaagagaaagtatatctgacaggtagcatattagcatttaggagtagagaataaagtgttttatgtgccaagagttaggaatgtctttatttaggaagtgaaagccgttaacgatcaccagaagtctgttgtaggatttctctcaatttgatacatactcttctctaaatacaagctacatctatctctcactatagaattccagaactcaagaatttgaggcacaagtatctctgaaggcaaagaataaggtaaggtttgaaataggaaaactgtttgaaactcattttaagaaataatcagacccacctagaatgactcccttaatgaggcagaaaaccagggactgattctctagaaaggttcaaccaaaaataatcagaacttgttgcaccaggcacagatgctcatgggaatgaagcatcataatgaaaacaagattcaagtgaaaattaacatgaccctcatccctttccctacttggtttcaagatgctaacaatcaggttcattccctggcataatactggagtattcttctctgatttctcctaatgaaaactcctactgagacttagactgggagtcccagttggctgacacttcccatgcaaaactacaataaagccctcagatacagagcatcacccaaattcaaggaaagccaacctgaaagaaaacactcggaggaaacaaagacactgtcaaaataactatagtagatatcctaagagaaataaaagatcttccatctgaaacatgaacgggaagctttccaaagaaatatactaagaaagacctcttgaaattctacaagaccacagaagttgtcagtattatacaatgactgggagatgaagttaaggcactctcatagaaagtaagacaggagaatataaaataaagacaaaagataaaactagaaggtcagtcccagcaatccaggatccaaataataagagtttccaaaggaaaaagcatttaacaaaagggatgaaattatgaaagaaacatgagggcccactaagtgccctgcacagtaagtgaaaaatccaaaacaagttatatcatcttgaaattaaaaacattagacatgaaaagatcagaaagacttccaaaaggaaataatggcaatcaggtttttaaacaaaagagaaatataaatggaactagacttactggcagtactggaagctagaaaacaatacctttaaatttctgagtaaaaattattccctgcctagaattctataaccgtaactatcaaaccaccatggaggtgaaataaaaacattttcagacgtgtaaggcttcctcaggttttggattattaaaatgagggcttaagccaagagagaacagcacatgggacccaggaaacaggaggcttaacaaaaaagagaggccaaggaaattcctaaaagtccatattggagcaggaagacagcaccaggtaagatgtttcccaaaaacccaattgaaacttgatataatgtgtttaaatcttttgagaggaactctatagctctggcacagagtgcaggaataaattggtagtatatggaaagcttatgtaaaagaaaaatgccattaactgcaggaaaatttaaaaacatgccaatagaagaaatgtcatcacaatatactccacaatctggctgtaaacaatacagagtcataaacgtgaaccctgaatattgacttaaccaaaaattatgatataaatatactaggaagacagaagaaggagaattatacgtgcttgttgttgagaagggtgtggtaagaaagctaaatcatcttcccttatggaaagtcaatacgtaacacatcttaaaactgggatagtaaaaactgaaaagtaaatacccgtagcatacaaaggtctttttagaaatggagaggtaacataaaaagtaaacatggctgcaagaacagaggactgcagggtttaagacgggcatagaagagactgacttttttattagacttttcgttatttgcttttaactagagaaaattaagtttttaaaaattaccaaaaaagcaatgtaattacctgtcaaacttttgactcaccctggcagtaattgttccgtgcttttctcctctgttgtttatcatccgaatcccagccgactgaaacatctccttcatttgagtaggggtagcagtggtggcaaaatctatatcctgaggctttactccatttaataaatccctcactgctcctcctgctattcttaattcgtgattctctttgacaaataattctg

SEQ ID NO: 1956 - DNA, 534 bp, Homo sapiens
ctccaccccatctttggaaaaactgttttccacgagactggtccctggtgtcgaaaaggttggggacggctgatctttgcatagtctcaaatataaggattatattaagccagaaatgtttctcattaaggaatcctttgttttgagctgtaggtcgtgttttagaacaagtctgtcctcttccatattgcaactcctaaaatatttgaaaaccagtgtgtccacttgagagacagctctaaactgaacatctctggtaacaagacattccctttgataataaaagttcccatatttgaacagcatggaatagaataacattgtctcatagattctagtcttctgttaaaaccgcagttacttttgcaccaaactaacatagctagaataggattggagtggcggggaagtcgagggtgtgagtggtgtagcacattgtacagttgcgtagtacaattccagctgtcagctcagtcccgagtcccttttatgtgtgctgtgttcccacgtttcctgcagatcttactccggcac

SEQ ID NO: 1957 - DNA, 191 bp, Homo sapiens
gatcttctttttttttttttttttttttgagatggagtctcgctctgtcgcccaggctggagtgcggtggcacgatctcggctcactgcaagctccgcctcccgggttcccgccatcctcctgcctcagcctcccgagtagctcggactacaggcgcacaccgccatgcctggctaattttttgtattttt

SEQ ID NO: 1958 - DNA, 519 bp, Homo sapiens
  SITE (429): n equals a,t,g, or c
caccctgaacgtaatactcatttctgtactttgttttgatgacatactattgagaaaaatttattgatacaaataaatagttaaatatgataactatcttattaatagtatagatctagcaatttcaggatactcttcaattaaactgatcacaacatgagaaaagagtaataggaaattttattctgcaacagaatcacaggcacctatagcctgcagtttttattattaatataaaatgtcagcaaccagagtataataatcctcctaactatgcatgtacctttcacattttattgcaaaactattaggctataataagaacatgcatcaagcagggacaccaatatcttgcctggcatttaattatcaaaaacacctgtgctacaatagtatattcacgtgtataattctttatatgtagacatntaagtgcttgaattatttaaaaaactactgtctggataaaacttcctaaccaatgacaaatgtcaaactgctcttaaatgagcacaccaa

SEQ ID NO: 1959 - DNA, 559 bp, Homo sapiens
caccctgaacgtaatactcatttctgtactttgttttgatgacatactattgagaaaaatttattgatacaaataaatagttaaatatgataactatcttattaatagtatagatctagcaatttcaggatactcttcaattaaactgatcacaacatgagaaaagagtaataggaaattttattctgcaacagaatcacaggcacctatagcctgcagtttttattattaatataaaatgtcagcaaccagagtataataatcctcctaactatgcatgtacctttcacattttattgcaaaactattaggctataataagaacatgcatcaagcagggacaccaatatcttgcctggcatttaattatcaaaaacacctgtgctacaatagtatattcacgtgtataattctttatatgtagacatttaagtgcttgaattatttaaaaaatctactgtctggataaaacttccataaccaatgacaaatgtcaaagctgctcttaaatgagcacagcaaagtcaaatgatataaacaataactagcaaagtcaaca

SEQ ID NO: 1960 - DNA, 1073 bp, Homo sapiens
gaaaacatatcaatagttttattaaatgtaaacacctaaacatactaattaaaggacagattttcacattgaaattttataaaattacttaaatataggctatatataagaaattaacctgatgagcaaaatggctgaacagaatcctctagcgatcatccccccacaggaacaccaaactgaacaactattcacacaaaacaagcaccttcataagaagcaaaaaacaggtgaaccggtacctggctttaacatcgtattaaggaaagaggcactgaagaggatttgaaagacaatcttgagtcacctataccacccctttcccgtacttcacctttggccatgtggtgttaaaaaacaatctgtgcacttgcatgagggagagtgcagtgattgtgggaatttgccttggaactcagtgctgccctgtcacagtggaaagccacacagggaaaaacttagctggtgcccacagagggagcatttaaactagtcctagccagaggcaagtcttctatcctgggggtacgaacctgagtttaagcaagcgtcatcaccacggcctaaaaaactctgggatcctagataaacgggaaaggcagtctaggccacagggactgcaattccttggcaagtcctggtactctgctgggctcggaaccagtggacttggggtgtatgtcatcagagatgaaaaaggaggcattacaagtgatatttcagaaataaaaaatacaagctactttgggtaactgaatgccaataatttatttaacctagaggaaatggataaattcctagactcatacaactcactaagattgaaccatgaagaaatccaaaacctgaacagaacaataacaaacaatgagatcaaatccataatacatctttcaacaaggaaaagcccagaacctgatggcttcactgctagattctaccaaacattcgaggaagaaataataccaatcttactcaaacttccaaaaaataggggagaaaggaatactttcaaactcattttacaaggccagtattactgtaataccaaaaacagacaagaacacattaaa

SEQ ID NO: 1961 - DNA, 26013 bp, Homo sapiens
tgtgttaaatgggcttgccaacaatatggatgatttgaagataaacaccgatattactggtgctaaagaagaactcctagatgacaacaattttatctcagacaaagagagcggagttcataagccaaaagattgtcaaacatcatttcagaaaaataatacgttgactctgcctgaagaactgtcaaaggacaaatctgaaaacgccttaagtggaggccagtctagtctatttatacatgctggtgctcctactgtttctagtgaaaactttatcttgcctaaaggagctgctgttaatggaccagtttcacactcctccttaactaagacttccaatatgaataaaggcagtgtttcattaaccactggacagcctgtggatcagccaacaacagaatcttgttcaactttgaaggtagcagctgatcttcagctgtctacaccacagaaagcaagtcaacaccaagttttatttttgttatcagatgtagcacatgctaagaatcccacccattccaataaaaaactacctacctctgcttcagttggttgtgacattcagaattcagtagggagtaatataaagtcagatggcactttaataaatcaagtagaggtgggtgaggatggtgaagatttattggtgaaagatgattgtgtcaatacagtaacgggaatttcctcaggtacagatggatttaggtcagaaaatgatacaaactgggatccccaaaaagagttcattcaatttcttatgactaatgaggaaacagtagataaagctccacctcattctaaaataggtctagaaaaaaaaagaaagcgaaaaatggatgtaagcaagataactcgttataccgaggattgctttagtgattctaattgtgtacccaataaatcaaaaatgcaagaagtagactttctagaacaaaatgaagagctacaagcagtagactcacagaaatatgcattatcaaaagtgaagcctgaatcaactgatgaagacttagaatctgtggatgccttccaacatctaatttataacccagataagtgtggagaagagagttcacctgttcatactagcacttttctttcaaataccttaaaaaagaaatgtgaagagagtgattctgagtcacctgctactttcagtaccgaagagccatcattctacccctgtacaaagtgcaatgtgaattttagggagaagaagcacctccacaggcatatgatgtatcatttagatgggaatagtcactttcgccatcttaatgtcccaaggccatatgcttgtagagaatgtggacggacatttcgagatcgcaattcacttctaaaacatatgattattcaccaggagagaagacagaagttgatggaggaaattcgtgaattgaaagaacttcaggatgaaggaagaagtgcacgattacagtgtcctcagtgtgtgtttggtaccaattgccctaaaacatttgtgcaacatgctaaaacccatgaaaaagataaaaggtactactgctgtgaagagtgtaacttcatggcagtgacagaaaatgaattggaatgccatcgaggcattgcacatggggcagtggtaaaatgccctatggtcacttctgatattgcccagagaaaaacacaaaaaaagactttcatgaaagactctgtagtaggatcatccaaaaaatcagctacctacatatgtaagatgtgtccttttactacttcagccaaaagtgttttaaaaaagcacacggagtacttgcattcatcatcatgtgttgattcatttggtagtcctcttggacttgataaaagaaaaaatgacatccttgaagaacctgtagatagtgatagcactaaaacattaactaaacaacagtcaaccacatttccaaagaactctgctttaaaacaagatgtgaagcgaacatttggatcaacctcacaatcaagtagtttttcaaaaattcataagcggccacacagaatacagaaagctcggaaaagcattgcccaatcaggtgtaaacatgtgcaatcaaaacagctctcctcataagaatgttacaattaaaagcagcgttgaccaaaaacctaagtatttccatcaagcagcaaaagaaaagtctaatgccaaggcaaatagccactatttgtatagacacaaatatgaaaactataggatgatcaaaaaatcaggtgaatcatatcctgtgcatttcaaaaaagaagaagctagttcattaaattctttacacctgttttcatcatcaagtaattctcacaacaattttatttcagaccctcataagcctgacgccaaaaggcctgaaagcttcaaagatcacagacgtgtagctgtaaagagagtaattaaggaatctaagaaggaaagttctgttggaggggaagacttggatagctatccagattttttgcataaaatgactgttgtcgttttgcaaaaacttaattctgctgaaaagaaagatagttatgaaacagaagatgaaagttcctgggataatgttgagttaggagactacactacacaggccatagaagatgaaacctatagtgatattaatcaagagcatgtaaatttattccctttatttaagagcaaagtggaaggtcaggagcctggagaaaatgctactcttagttatgaccaaaacgatggcttttattttgaatactatgaagatactggaagtaacaactttttgcatgagatacatgatcctcagcatttagaaactgcagatgcttcattgtcaaagcatagttctgtttttcattggactgatttgtctcttgagaagaaatcgtgtccttactgcccagcaacatttgaaacaggtgttgggttatcaaatcatgtcagggggcatcttcacagagcaggattaagctatgaagcccgtcatgttgtatcaccagaacaaatagccacaagtgacaaaatgcagcatttcaaaagaactggcacaggaacacctgttaaacgagttagaaaaggtaagttctccatggggatgatttgggctgataggtctgtgttctaattctgaagatttaaaagttttttttgaatttagtctttattagaatcataattttatgtttcagaattaactcattttagggtggtcagtttatataagaaagtctgatattactcttaaaaatttttttctagctatagagaagtctgaaaccacttctgaacacacttgtcagctctgtggtggttggtttgatactaaaattggattatcaaatcatgttagaggccacttgaaaagacttggaaagacgaaatgggatgctcacaaatctccaatctgtgttctgaatgagatgatgcaaaatgaagaaaaatatgaaaaaatcttaaaggcattgaacagtcgtcgtattattcccagaccatttgtagctcaaaaacttgcatcaagtgatgactttatatctcaaaatgttatacctcttgaagcataccgtaatggcctaaagactgaagctctgtcagtgtctgcatcagaagaagaagggctgaatttcttaaatgaatatgatgaaacaaaaccagaactgcccagtgggaaaaagaatcagtctcttacactcatagaacttcttaaaaataaaaggatgggagaagaaaggaattctgctatttctcctcaaaagatccataatcagacagcaagaaagagattcgttcagaaatgcgttcttccattaaatgaggatagtccgttgatgtatcagccacaaaaaatggacttgactatgcactcaggtaagaggacgtttatgactatgctatacacagtttaaatgcagttcaattatgccttctttaatggaatctatgtggaaaatactttctcacaatcttcctgtttaagctgctttttttttttacagagcacagattggttattctactgtcatttctgtataactcatcaattgatgctcattagcactgagttctctgtgcctcttttcttggtctgaatgtaaggtgagaacaaaagcagaagaaaaccacacacacacacaataaaaacaacaaacaaaaagctgatctgtaaaaataaaacttgctctggctggaggatggttgtggatgggaggttgatgttcaaaagcatagcattattgaaaaggcatacctctgtcatatttttgccagttctccaaggtgatcatgttttcaagatttagctgttggtttttccactgcttaggtaaaacaaaacagactcttaaagctgaatggattggtgtctgttgtgattaacccaaagaaacatctccctctccaattcctcattgtattgcggaatagtttggttttggagaacagttgtgaacataaaacatatttgtttggggttttaggttttaagatagtgctctaatggaacaggacagatgatttagcttagtgctggtgcaccaatagttttttccttttgaaaggaatattttgtatgtattggcaaataatgtggcagataaagtagccaaactttattcagtattgccaagtgtggtttatacttttagactagaaaaattttaagtgttttttctagatttctttttgaaggttaatgttgaaggtttatgtaaatggtctcatgattagagctctaagttgaatgtgtcagaggtaatagttaatggattaataacgactaacattactgtaaagtaatgttgtttatttgctttggggcagacattgtgatatcccgaatagttgtaatgcagttttgatttaaggaaagataactttgtattgtaagtggtctggaaagcagtttatcttgtatgagcttctgtttaatccggctttttctttcgaataaagagtctctgaaagtcaatagctttcaatattttttcagaagggtaaaacgcagggaagatgtgttagctgtgttgaccaaggggtagtatacttcagagatggaaagcatatttgtggctatcacagtaatgctgaagaaaccagttgaaatgtgttgggggagtgaggattgtctgagaagttaggagtttcttattgtttgaacatgtttttcctgtgatgactaagatgttagcttgttgatcatttatttagcacaaagattttagcaaaaaactttaaatcattaactttcattattgattgcgcattcagagtaatgaacataaaataccctaaataaaatgttgtgtctaacagctgttcagtggtgtgttttaccaccttttctcccagccttcatcagaaagcctaatttagtattgagacttttacggttttgtgggtaaaacactttaattaccactttgtcaactagactttttaattctttttattggtaatgttgtaagctttgaaacttctcaacagaaccgtgttgttcaaatcacaggattgtattgtagtaggtttaagaaataatctgcgtaacacagaaatctgcaagaaagtaataataggtgtatatccagaggagctcaaaggttcaagtcactcctcgtctacctttccaaagagcatgagttgactctaaatactaactacaaactaataacagttaacttaatttcccctccttattttaagttaacctatttcattgaacgttttgaaaaccatctttattgtggtgcttttctacactctttaagctaagaaaatttcactttttgaagtgagaactggattatagttttcttttgaatgataggtatgcctgtgaagcttagaacatgtgtgcattgcaatacgacgtttacaagtgctgttagcctgtccaaccacttacgcgcttatgcacgaaagaagagtgctggacttttgactggtacaggtatgtttgaacagatatcacagcaagtctgtttgatacaatacactttttttttccccaccagactggtgttaattcagatcatatttatagctttctttggtaagctgcatttgagtctgaatacccattgaatttcagcaacttgtaaactgttagatgtaattctaagcaagttaatctttttcttttggctcttattgacttaatttgggggaaaaaaaattaacccaagaggtgtggaactttgagtctaccttaatcccatttattttttagaatactatttttgatttttaaattgattttagattccagtaaaacacctctctttatagttctagtcgggctcagtggtgtgcccctatagtcccagctactcatgaggctggcaggaggatcacttgagctcaagagttagcggctataatgtgctatgattgtgcctgtgaatagtcactgcactccagcctgggcaacatagcataaaaatattgtagttctagcttggggaaatcctttattagaaaaggaaattatagggaaatttcaaaatgtagacttgattaggaaactaagcaaactaatgaattttcattagtctatagattagatctttgaaggggtgagccttaataatggcttgtgttgacaagcgaatagatttttcttttaatacttcttaaatatattaaggattaataaatttagctatgcacataagtgttaacatgcacatttctgtgttatttttggttggttagcccaaccttgcagatacctcttaatactgctcatctgtgaaaattttattagcttacttatatgtaatacgcttcttataacctacaaaatgctttgcactttcatttgtagtcttttaagctaccctgcttcagcaaatctcatttccctcacatcttaaaatataccctctttttgacatagatctacataaattcttttgcctaaaattctttccaatcattttatttctcttgctcttttttagatcactgcctcctgctttcttctagttgttttcccagcttttttgttcttcctcatgtcctagaacttagatccaatatgttcttgctttcaaaaaaccacttatatttatactagtgtctttcttctgcttctttgcattcttccttaacttgatatacaaatgaccagggatgaatgttgacaatttatattaaaaagagaggagtggggtgagttttagtctactggattaggcctcctactctgagattataatttttatataccctcacctttatcaggcttggcaagtgattgcagacattagaggtggggaacaataaaaataagagactatacaagtaggaaatcattattgttaccatacttgctaacttttattgaacatttactatgtgtcaggcactatgctatgcaatttacatgcataacatttaatctttacaacagccatacaagttgtaggtactggaattctcttaacgttttataggaaactaggacttaaagaacttaatttgctcaaacttacacagttaataagtagcaaggttgtaattcaaatcagggctatcttacctaatctttgtttttaatcactattctctaccttacacaggcggtctatttttgaatttcttatttttaaaataagaaattgaaataaaaataagcaatggaaaattctaaaatgaaggtgggtttgttcatttatttatttatttattttgagacggagtctcgctctgtcacccagattggagtgcagtggcgcgatctcggctcactgcaacctccacctccctggttcaagcaattcccctgcctcagcctcccgagtagctgggattacagactcatgccatcatgcctggcaaatttttttgtatttttagtagagatggggttttaccatgttggacaggctggtctcgaactcctgacctcaggcagtctgcccgccttagcctcccaaagtgctgggattacagccgagagccaccgcacccagcctgaaggtgggtttaaaatggggactattctggtgaagactgaataaataagagtctaattaaaaagagcagagatccaagaagtgcttaggcctaaattagactttagaggagttaatgttccattctgattattcaagcagattatgcaaatatccaataaggcaagatatctccagtccagattttattagtccattaaaaaaatgcttttacttcatctgaaaattctgcaaaacacaggattaattacttataaataactggtagtaaatctccatttaccaagaatgcacttatgaagattatctaaaaaatcttcattatcagagagaaaagtaatgtaggatgactgggaatatgtttaggtcctgaagaataaaagagggtgttattttaaaaatatgattaagtactaccaaaatattagaagtactaggaaatagaaagcgtgtgtttggcagtcctaggcaaagaaaaggaaaatgagaaactgaagaaagcctagggtcttattttccacacccagtagccacttttgagaaactttaaaaactaatgcttctttttcttggaaattctgaaacattttttccctcattaaaaaaaatcttcttgatcagtagagctatacagatgtctttgctgcttattcatgccaactaagaagttttttttcaagctttattaacttttctgttttccagatagagaattctgtattgtatttacaaactccacatactgattatcccccatatcaatatcactgttataaagcagtgttcctaaaaacctatggccctagaaggttccacttggttattataagtgattcattaattcatatgagtaacaggcatcatttttcaagaacacatgatcttttaatgaataaaatgcaaattcatttttataaaatcttaccttagtatatcacaaaattggaacaatgtaaagggaaagtagataggaataaagcctccctaaccatgtccagtatgtgtatttctagtttaagcagtcttaattcatgtagattttaagttgtgtggtccactcttgaatacaaagcttagataccctcagactaaatggtaaaggcctgcttttggttacctgtgatagaataaactttcaagccttcttagaagccacagctcctggtcttttctgtgggaactggtgaccttttgagggaagaaaaatatttcttctaacttataatctcttcaagtatcctgaatacactgaaaaggatatccctcttcttcccaaaatacctgtttactggtaacttaaatacttctaatgtgatggttctcaatctttactggggtcaccgacatctttgagaatttcatgaaagctgtgggccccatcccagaaacatgcacttatttgttctcagataaaaatttttgtgtgtatagactttgcgtatctcctgaaggctatcatcaatttgtctgatggcaaattgagaaaggagagatgccagaataaaaggaaagtagaaacagaactaggaatcagaagccttaagaagttcttttttttttaagagcagaagatgcttaaaatgcaagaattgcataatagcaaaactaattgtggggtcattatcttccctaatatttgtaaaaggaaccgatgggggaaataggaaagatttagaattgaagatttggaagaggtgggcagacttgggagagttaaattgtcataaaagaataatttcacagattaaagttttgcccagaactgtcccagtttatcttctgttgggtaggttcaaataaattgtttaataatttttctgtgtcttcacttgtagataatttatgaagctgttttacttcctttccccgatcaatctttatcaaaatagactagaatcaaagggtttattttatatcctatattgtaaatttaaggcagacttcttattcaagagtttattctagttatttatggaatgcagtaatggtaggggttttttttttttttgagattttgttctctttaatgttttacatgctcatacagatttttttctggttaattttccatacagtttaatgagaacattatatagttttcattaaatattgaaattttataatgtagcttatattaattacttctggactttttattttactgattagctttttttgtgcctaatgttttaattaaatgatgtatttttatgctagccatattaagaacatagttctattaagttattaatggagtgactatacatactggtttaccttgttgtcacacctaagtactagtgcctcttttactctcataagtgtcctggattgaatgataaattaatcatcctggttattaaaattgctaaagcatttaaaattaaggtaaagcatattctatcaacctaatctgcaatcaggaaaaaaaatatattttgaggtcaaaataagagtgaatttcaacaggtagggaaagggaaatacagagtagagagaatgttgttaaaggaagtagatctgtcagatgaatgccacaatgcttttctatggtagatagcatgttgttatcttttgtaaagaagaaacaatgatggtagcagtcagcattttaattgagactttattttatatcttgaccacatgtacaaacttacattaatacaaacacacaattccttgtgtactcacctaaatgtactttaatattttcttttttattatattctttgttgtgaaaaattaatgctggtcatgagccagtaaattgatttgctacccacttaagaagtcactatcatagattgaagacactgccctaactgcctctttctcttaggggttggtactgaccaatggtagtagtatcttagatgtcataactcttctgtggcagcaggtgaattttctatactcattctatccacatttttctctctagatcacttttgtaaatcaaatgctaacctctgggacttaaagtaattggaaatttctagttactcatttaaaattaatgcaagaaaaatatttttatatttgggaggggcttcatttcattatcttcagaacaattttgtgtgtgtgtgtgtgagacggagtttcactctagttgcccaggctggagtgcaatggtgcagtctcggctcactgcaacctctgcctcccaggttcaagtgattctcctggctcagcctcctgagtagctgggattacaggcacacgccatcacgcccggctaattttgtatttttagtagagatggggtttctccatgttggtcaggctggtctcgaactcctgactttaggtgatccacccgcctgggcttcccaaagtgctgggattacaggcgtgagccactgcacccagcccagaacactttcttgatacgttttggaagtaaagcccaattgttgctattctacaacaaatgacttatccatcataattatttgacttttctgatgaggtcaataccactagtgcaatatattaacgtttttaaaaaatcaagtcagtgttttatttttcataccatttacttttaagtgtaatcgtagtaggtttcttttgcctgttttcagctttaatgatataattggccacacaggactgtaacaagtactaatgaacatatagcacagtatcaagtgctgaatgggtttgtaagccactagaaaagtcattcttatgttgtggaaagtgctatgggagcactttctgatgtgatagaaaaaatagtattgtgaaagcttcccaatgtgcattaaattatttgttcattcatgagtgtcactgtagtgtcttttaaaaataatatagtattgcatgtttgaaaaattgcatgttttcatagtggttcattcagactgaaagagtgtaagtagaaaattttgatcttcttattaagattaaactccaaatgagcaaacttgcttctgcttaaagcaaactccttgacaattcttccagactgggctgaggagggtatgtgaaaagtatgagacatgtctctgctgtcagagaaattaggaaaggattgttgacaacatacataaaactatcaaaaattgaaaactatgcaagatagtatacaactaaatggcatattggctttaagtgttgtaggagttcaggttgattattttagtctaagcctccttttgagggcagctgggaattgagattccttttttttctgatgcccttactgtttgtctcattgaattagagcttgtaaaaaacagaaaaaataaataaataaaagtagttcatgctggtatgcttcttgtgactttttaaatgcaagagaacaacaaaaccagcagccatacaaaattttattcattcaacaaaagtttgagttcttgtaccaagactgttcatcgctgagccagtaaagatactgcactccagctgcataaacataatataacccagtgggaaaagatcaagtatgccattacagaagggtttatatggtttcagccagaccctgaagttgaaggatgcagtagagttttaggaagacgagatgaagtgtagaatatttcaggcagagaagaacatagtgtggacacaaagggatgaaatttggacttcaagtgtcaggagtggaacttggagttcaagtgtcagaagatttggttacagatgtttggtaaaattgtagtgccagaaaggtggggttggtgctttgaatgcttggtaaaaaaaattaggaagtcattaaaggatgttttaaaaataaggaggccgggcgtggtggctcacacttgtaatcccattactttgggaggctgaggcaggcacatcacctgaggtcaggagcgtgagaccatcatggtcaacatggtgaaaccctgcctctactaaaaaaaaatacaaagaactagccaggcgtggtggtatgcgcctgtaatcccagctattcaggaggctgaggcaggaggattgcatgaacccagaagctggaggttgcagtgagccgagattgtgccattgcattccagcctgggcaacaagagcaaaactcctcaaaaaaaaaaaaaaaaaatcagcccagtgtggtggtgcgcgcctgtaatctgagctactcaggaggctgaggcaggagaattgcttgaacctgggaggtgcaggttgcagtgagccaagattgcgccactgcactccagcctgggcgacagagtgagactccgtctcataaataaatacaaaaggaaaataggccaggtgccgtggctaacacctgtaatcccaagcactttgggaggccgaggcaggcggatcacctgaggtcaggagtttgagaccagcctggccaacatggtgaaactccgtctctactaaaaaatacgaaaaagtagccaggcgtggtggtgggcgcctgtaatcccagctactcaggaggctgaggcaggagaatcgcttaaacctgagaggtggagattgcagtgagctgagatcatgctgttgcactccagcctgggcaacagagcaagactccatctccaaagaaggaaggaaggaaggaaagaaggaagtgaaggagggaggaagagagggagggcagagagagagagaagaaaaataagggaatggtatggttaaacttatattttaaaaagcctttcatgagacagagaaaagatgggtctttatatttcttagctataacttatttctatagtattgttcttcattaagagcatatatgtgtatacatttatctgcacagtaacgtatcatttataagtgattagcaaggtaacgaattatctgagttgagtaaattctctaggtgactgaagaatagtcctttaactgttaataacttgatttttcctaaccattttggtggttattgctccaaaatgttgttcttatttttgccttgagtagcttggatataatttaatcgagtattttgggtaacccttatagatactctactaattgttttattattccagcaagaattaggctatttctccaccatacaaaaaaatgatcggctgattttttcactaattcaacaagcacttttttcacctccaactgtgctaagtatgcagagatacattggatcttacaatacagtagaagcacatatatgcataactgtaatacaagacaaattgttaagtgccattggagaggtatgcgtgaaatactgtggaatttcagagaaagaggaagacactttcagctagactaggaactcccaaggcttttggaattagcatttgaatggaccctgatgtatagctaactgaaatggaaatgggggtcggggtggggaagagaaatgcctgaaagagggagcaaggtggaacaatgtgggaagtttataggaaatactaggaagtaggaggtaagggaattgagttggactggtaaagtgagtcagatagatgacatagaacgctagtctaagatgttggaattaactttgtagtggggaactatttgaatgcagaatttgtgtaatgcttttgaaattgctttttaaataaaggatttggcagagaggaggaaaaattgcagggtagatcattttaagagtcctgtaccaggtcagtgacattaagaatgtaaaggaggggtactagatgtatgggtaatattatggaaataaaataagcaggatatggtagattagagttaagagatgactcaagattttaaatctgagtgggaggaggatggttataccagtacagttaatcaatctgctaccatgctgtctggtagaagggcaggcttcattacttctctgtcatttactagcaacacttcaacatccagctatccactataacaaagtatcaccttaaaagcaggagatctacaaatttggaaaagagagctttatttcttaggaagcttgaagcctgcaggcttggaagtgtatcctcagacagagaccaaaagcaagcccttcaaaggaggaagggtgagacaggaagttatgttgaatgggttggctaagtatacatattcaacagattataggaggagctatgaatattcatgagggggtgcacacaagcttagtgtgcacactccatgttacatacatcccatgttcactttgagttggagacctaacatttaatcatagtaaaattaaggtttacatgtcaaaaggtgaaacagagttcataggcatcctatgtgcagccttcatggaccagctagaaccagttggtgatctcttatcagtaaggaatgctggtcagttcaaaaccacaaaaacagagtggagtctggcttctgagttaggcaattggttgatatcagtggggagcaagtcttttgaaagggttggtttctttttaactcttaggaaggaaagttttatggtggttagtgagggaggggacctaacgagacttgctttacctcctgtcccatcatggctgggaactcaatttttaaggtttctctggggtcaccttggcaaagaggagggtgtccattcagtctgctgtagaacttagaattttatttttatttctcaaaagcaaataaccacacttgttgaatcagtaagtttgtttttaggagaatatagcctaagagttacaccattgtagcataaaatacttaaattttatgatgcttgttttttgctgctcattggtttcataaggaaggtgatctattttgactgacatcttgtttttcatgcaagtcttatctagtttcctagcattactattggtttaattatttactaagtttctgggttttgcttttttttttttaatatatgtttgggaatcttaaatatatctaattatatcttcagttataatgtttgtgtttgctatgatttttattctctaagccttaaataatgagattcagaaaatatcattaggtatagagtttattcaagcccaaagcttgaggatggccacctgggagcataggttcaagttgccctggatatacactgtgattagcagcagttacaagtgaatttttaagaaaaaaagcggtttctatgtttatttaccaagaatttacattaagataacgtaagctatcgattggctatacattgttctttgtatcacagatttcaggaacataaaaataatgggtgaggcatcaggtcaggaacataatgaatgcctagtttaaacaattgccctccccccagtggggggcatgagagtcaagtgactgaagtcccctactccagtctttctgggcctggtaaatcttgcatactgtgcatagctgactgctgagctgctttccttctctctaacatgaatttcttgaatgcggtttgtaatctggattaagatagaattagcccttataatataacaaggcatgtggttggccagagctaaattttaggtaatgttttaattgactttacggaaataataaaataacactcagactttctctattggaggttagggcaaaaggatggcttattggtaggtagttcctcacttactgcagaagtagaaaaaagtagaaaagtagaatttacttttttttttggtatgcctagggtttgaagaatgaggttaattcttgttatccaaggtttatgtatttaattgtagcttagctggaagttggctaaaacagaaaatatctgatcaataccatgtttggttatagtttgaattttggctggaattacacgtgtaaggctcttgagaactataaaaagccaaatcagatccattgcgaccatggatttgtgccatttagatttactaatatattgttgtgagtcctatctaatttaaggtaaatatgattgtattgaaaataatttaaaggaaattttaaagtttggtggttttcttagctaattttatgatcaagaacaatttaattattgttactacatctgaaatgatatatcagaaatacggagattttagagggcagggactgtgattattttgtttgtaattctcaacaaaagtgacttaaagcagattgtcattatgtactttaatgtttattctaatttcagatgtgtcttacaaaagtggttgatgttgatggctaatgcctattttgcttaataaaacggcatacaagtccaacttacttgaaaagaaatttttaaatgttattttcttacctgtcaccacaaagaagtaatacgtttgctatcctatcaactcagctgaccagtaagccacttgtagttgtgatattgttagcttttttagctttgggtaagctgataaaactagcctgcctctaattcctgtttataaaaatgtgtgatgaagtatcatatttatgtccagcttttccctttatttacatagagaatacttgctcaaaataccctttagtaatcatcccctctactttgaaatagtggagtcttctacaaattgtactttttctttaactgaatccattcaagtttaaataaaaggctacttccatttcctttaactctttctctgaactataaggctgttgactatacttaatttaacttcctactttgtaggacaaactcaagcaaccagtccttgtggactaataattgtaaaaccacaaacctaattcttaaagcaaaggaaatctgctttccaggtattttgcatttcatcctcttccaggtaaattattaaaacaagcaggaactagttaactttgccactgattgctgtgtgattgagttacttatctttttttcagtcattgggagtggaaactctaaaaattaatgaaagttatttagggtactaaaaaattacccaattttagagtgaaaatatcaagggaaaatgttgatgaaaataaatacttttgaggtgaccaaatgtgtatctttatacttcatgcctgactgtaagggaaacattgctttttataatgtaaactactcatcttgggaataatgaagtggtatagctaggagcaaagaactgatgttgataggagtaggggagtccttttcaattttaatactgtgtagagtggggatttaacaatttttctcagcctttttttttccttttttgaatgggccgagagattgaggggtggaactgaatgcagcctttctcatttatgatagtagatactcaggtcccagggctgctatttgcaaagtccaatgcaaaatgagttatgtggtagacctcgttcaaaaattaatagtttcaaggctgcaacagtagagcattaaactgagtgtggggctctccctatgtgactgtgtaagttggacacccatgaagctggtctcctaggcactttgtacagaaagaaagataaaagctgaataaatgaaactttggcttctcagcaattggctttctctaccccattcctgttttacacaagctagcatgtttttgttgttgttgttgttttctaaaaaaaggccctgattctttttcatttgaggccaaaggaaagaaaattatatttgcagtctttttatatgcttggggcttatgaaccttgaaggattagtgacaacagttataattgaatttattactaacacaggaacagaaaaccaatactgaatgttttcacttataagtaggggctaaacaacgagaacacatggacacaaagaagggagcaacagactggggcctaccttaagggtggagggtaggaggagggagataataaaaaaaactacctatcaggtactgtgcttattgcctgggtgatgaaatagtctgtacaccaactcccgtgacaatttacctatataacaaacctgcacgtgtacccctgaagttaaaataaaggtttaaaaaaaagagttgagtttatttttcttacacttgtgtatcctttggcatgtgtgcatcctcttcccacctcaccactgccagcacgacctccagcaccaactttttaatagtgatagaatgatgatttacctgttcgtgtcatgtttattcctactgtagttctgaatgagctcatagctaatattgtccaccaaacttaacacaggccaaccacttagagaagaaattttcttccctctcgtaggggtatactgtgcctcttactttgggtatagataccccagttgtttcactttgtcctagagataccagcaaccaattagaaaagaaatggattaaacaagacttttaagttattgggcaggtgagaatgattacaaataaaaatacttcggtggcgaatgttaatttagttatggtgtgctttatcaaagaagttccagatgtttttatgaaatctcattctcttgggtcatttatatcgtgaaggaaaaagaaaatgaaactcattgaagcaattattgtataaaatgggcagaaaggtggaaagagcaaaagattttaatgtcaaagtcaaaagtaaattcttaatcttctttgtataaaactaaataatggctcagaaaacagacttgaatttttatgtgttgtgttatctatttatttgctttgcaccaatctggtttagtgctttggcatgttgttgtcgtcatggtcattggtcgtcgtattcatagcatagcagtgtggtgttctttttgaggactcatgagtttattgtatttctctttcatatttgtatttgaccaagacaaatatcttactgaaaggtatattctattttttttttttgcatttgaccttacagctcaatttattctccgtatgagtaaaatattctcagtagcaatttagatcttttataaatcaggtaacttgaaagataacagtcttttggttgaaattgatcacttaaacagtttctgcccaccgaatagtaatcttaggaaggtttggatgactggatttgtttctttctatagaagcttatgcttgagaagaaaattaatactttctaaaaataattttttaatatatttaaagtatagaaacaatgttagatttaaaatactttgtaaagagaaaagagtgtgtgggttttttgtttttaagttccttggagttttttggtcactaacaagtgcaaataaaatcctattacaaaaaaaggctttgtgtaacagttatctatttggcagattattcatataaacaactctgttaaagctttggctgtttatcacagatactgatgagctgcattatattaaaactgaatgtgttagtgatctgtatttaatgttctagtggctcctggtacagtccagaacaaaactacttttccctctagatataataaaatctcttaagtgagaatattggtataacagacatgtttctacctcatccttttcatttattgaaattttctgtgtaaatcatccttttatgtagaggatcctatatagatgtcccctttttgtgcagttttaatatgttaaatactcaattttaaacagattttcccaaaggtatgggcagtatcacaggagtgggtttggatattggcattagaaaaactattgtaaaatatgttcatgtttcacctgctcaaaaatataacatttcaggagataataaatctagaattgatgaagatattaaaacactgaggcatttagatttcaatttccaaagttcccagatttttaatattttaactttgtgaataagtttctagggattctcagtgcatgagattctgtaaccttaactttggagccctgggttctagagatgattgatcagtcataagctggcagagttgtcctgctttccaaggttataataccttcaaatactcattgctacaaaaatgatggcattctcatttcaagtttagatctgatcattcataaaacagcctaaacttaagagtttccacagtccataaagcatcaaaagccataaaataattcttttttccctattaaagaaaaagccaaaaatatttctgtattttagaataaacatttccagttccatttttaaaatattaacaacatgtaaatttaaatgcttttgtaactgataaaatgttcttttgcatatttccctaccatcctcctgcccttcttcctcaatttgctttacacccctaacattaacattctgtgaacaaatttttaagggttgttataatgtattctatttgtatcctacagtaatttatttgcattttaaaaggagtttgaatacagtgtggcaattttgacaaccagcaagctcatcaaagtaagattctacctgtaatcttatgatacaccaaatgcctgctctattctgcctaacacagacaaggatccatctttacagatggaaagaatagctgacatctagtagcacttactctttgagttccctgaactctatttctagtgtatgaatcactcataacccacttaaattcagattgctcaccaaagcgattaggaaaaaggtttttcctactgggtacaaagcataaggtatttcactcttgtagttgttgtgaataacctagtttctgtacataagctggctggtcagtgatttatatctaggataatgaagtatgtgtgactgcagcaacatatttaaacaaatgatgcacaatgttgtacaggaatattacctgtattaaataggagtaaaacattttcattcataggctgtctaaatatcaatggttaaattactgagttttgctttatttttactccagaagtatttgttgagttcctactacatgcgaggctcttgactgagataactaataagatccttataagatttttctattccagagtttggttgtttagctttgaattacccattctttaatacctaacttgacttctagtagttctttacttattagactcttcttctaaggataaacagaaaaagactgtgtcctagattttacttttgaataggcaggtgacaggaagctgaaaccagtggcttcaatgagatttaggtttcttgtggttttgaattttctatatgacatttctgttatcattgccatttgactaaggaactatgtttactggttttgtaatagtagcatctattcttttggaatctggactttgaacaattcgtttcacagagtcattgaacagccagttccttctctcttacttagaatttttccagggaatttttcacatggcaggataatggaagaaaagccatttgggtaactcttctgttacatttgtatccctccccccttggatccctacagataaattcttaccttctcttcctgctaattgaccagcagcaccctggattgctatcatccctttgtccaaagaaatggtgtagctgtattcaaagacctataaaatgttatgtgctatctattgctacctataaaaaatacctttttttctttttaaaatcaggttgttttagaataaataaaggaaaagtcaattaatggaaaaatttcaagaacagttcacataaaattttggtctattttaatttttttttttaccttttcaaatcacattttaaaataagcagttggagaaaatgtaaaatgaaaaatatgtaaagaatagttagcattaaacatcagatccaattgtaaacttacgtgagataatatggatttatatttattttctagtaaaataaaacttatatgattgcataattgattattgtatatgcaatacaaattaagttcaaaaatgaaagttgagctttttttgtcctttcaaatgtagggccagcatacaattttaagagctatttattataaaattcatggtgaatcactatgaaaattgatttttccttgagcttttaattacattatccatattcccttacgaagttttccaagtatagaagacctacttaatggagcagtaatcaaatgcaaacttaatttaatgatctcaaataaaaggttctacttttctggaaataagattaaaccagatattaaaattatgtatgattataaaagtaaagattaccattattgtaataattgaccaatttagtactttcaagttatttagttacattttctcagttctagtttggtgtggtaaagcattatttgaaaaggcagtataggaagaatacagatagtattcttcagtacagataataccgctgtacagtacagataatattactgctattacagaatcagcaagttgaatgcatgcttcagggaatagggaaatgaatgcggactttttctaactgatttagatggtctgtctgacctctctagaaaaatatgtgtgtatgtatattttgaaatatataaggaatgttaagtctttctcttcccctttttagccttagattgtaagcaaaagaaatcaaggtcaagatctggaagcaagaagaaaatgctaacattacctcatggtgctgacgaggtttacattctccgatgcaggtatatgcctatattgccaaatctgatcagtttcttcatactttgctttgaaacatattagctatttcatttgggatttttaatttgtggcagagtgcattctcaacaatcaagttataaatgaacttttggagataggcttaaaatcttaattcagctcacaatatccgtacttcaacaactaatgaatcaagttttttacattagccaatagtaatgtaaatctattatactgtgatttattaaagtagcttggccaggtgtggtggctcatgcctgtaattccagcactttgggtggccaagatgggtggatcacttgaggccaggagttcaagagcagcctggccaacatgatgaaacctcgtgtctactaaaaataccaaaattagccaggctttgtagcgggtgcctgtaatcccagctacttgggaggctgaggcaggagaattgcttgagcccaggaggcagaggttgcagtgggccgagatcgtgccactgcactccagcctgagcgacagagcaagactctgtctcagaaaaaagaaaaaaaaactggctttccttgtgtttatttggtttgtatggtttaattttgtttggtttgatgttttgttgtcttgagttctcgcttattgggaacacattttctctcccctcatagtcacgccttcttccgtactcacactcacacacaacacacatgaagaaacatagacacaatgccatttaaggaatgctaaactggggaagggtcttttctaaagaatgacatattttggagtaatagttgttgtttcaagtgaattaagatgtgtagatgttaattttaaaataataatgctcccacctatacaaagattactggagtttattatagctgttaataaacatatgaattgggagttttgatgttttattaaatcatttgactttagaaactttatcaattgctgtctttaaaatatgataaagtttattccttatgttttaggattttgtgtgaattagttttaaagaaagagaattggtcatgttaagagaattgttatctttctgtaggttttgtggcctagtctttcgaggacccttgtctgttcaggaagactggattaagcacttacaacgacatattgtaaacgctaatcttccacggactggagctggcatggtggaagtcacgtcactacttaaaaagcctgcctccattacagaaacttcattttctctactaatggccgaagcagcttcatagaaccaggaaaccttttaaatagccagtttgaattggatgtaaatttgaaattctttttttttaagccacattaaattatctgtttataaatactaaagcaggaaaatggggggaaagtgaattacagtgacatcagagcaaattgaatacttaaaacagtaagtagtctatatattttatatagggtggaagatgtgtttttaaggtttatgaagttttgttggttaactgtgttcactcagtaaaagagcagtacatgtaagcagccattaataaactgttgcacatggatacttatagacagacttattggacaattatgttttttgcagtgttaccagaatcaaggctctgtttattccccacaagacttgcatagaaaaataagatattatattttgtttgtatgtatttagtgttttgtataataccaagaaccgctgactaaatttactcaaattagggcattaaatatcatgtacttcatagtttgagactgttcactcaaatagggcagagtactattctatctagatgtgtaagtgttttttttaaaatcacatggaacggttttttttatactaaaaagtggagggagatttgtttaaacaagtatttctaaaagaaatatgtacatagttctggaaattatttgtggtaaggaaatattctttactccagttgcatttctcagacaataaagtggtgcatccatgctacctcctactttgtcaacaaagatgctatttaccctttacatttttgtatcataatagattttaaaaatctaatgttctttattgcaagacattcttttgttaacaggtttgtttctttttaatgttttacctaaaatttgacatgcttacaggacaggtttgcctcttactttatttaacattgtagaaatgtaattaataaacaatgctcactacacagtttagaatagacgttctcatttatattatcttccaaatttgatcagttagcaaaacttaatacaccaattaaaatatttctacatatgagaatgtttacaatttaaattttagaacttgttttggatgtgattatatgtacgaaaatcgtgtaacactatgctcatgctaagaaccgacataacagaattactgaaataaatgtgctgtgaggaatggaaaatatggtgcaggtgtcttggtcatgataaattgtgattctttttaaaaattttttccaaaaacaattaggtattttaatctgaaatcagattcctttacaaacaacaagtttttgtatgcaagcaccattttatttcatgtagtatggctaatactatagttgaaccaaggatatgcattgattctttgcttcgtatgtaaataaagttaaaaacagttaaaataaggagtattttggtagagtatatacatacctcactgccagtgaaattgctttcctatggtatatctccttaccagaaaaatctctaaataaaaaaaggtttaaagaaaattaaaatgtgaaa

SEQ ID NO: 1962 - DNA, 26018 bp, Homo sapiens
tctagactaaatgtgttaaatgggcttgccaacaatatggatgatttgaagataaacaccgatattactggtgctaaagaagaactcctagatgacaacaattttatctcagacaaagagagcggagttcataagccaaaagattgtcaaacatcatttcagaaaaataatacgttgactctgcctgaagaactgtcaaaggacaaatctgaaaacgccttaagtggaggccagtctagtctatttatacatgctggtgctcctactgtttctagtgaaaactttatcttgcctaaaggagctgctgttaatggaccagtttcacactcctccttaactaagacttccaatatgaataaaggcagtgtttcattaaccactggacagcctgtggatcagccaacaacagaatcttgttcaactttgaaggtagcagctgatcttcagctgtctacaccacagaaagcaagtcaacaccaagttttatttttgttatcagatgtagcacatgctaagaatcccacccattccaataaaaaactacctacctctgcttcagttggttgtgacattcagaattcagtagggagtaatataaagtcagatggcactttaataaatcaagtagaggtgggtgaggatggtgaagatttattggtgaaagatgattgtgtcaatacagtaacgggaatttcctcaggtacagatggatttaggtcagaaaatgatacaaactgggatccccaaaaagagttcattcaatttcttatgactaatgaggaaacagtagataaagctccacctcattctaaaataggtctagaaaaaaaaagaaagcgaaaaatggatgtaagcaagataactcgttataccgaggattgctttagtgattctaattgtgtacccaataaatcaaaaatgcaagaagtagactttctagaacaaaatgaagagctacaagcagtagactcacagaaatatgcattatcaaaagtgaagcctgaatcaactgatgaagacttagaatctgtggatgccttccaacatctaatttataacccagataagtgtggagaagagagttcacctgttcatactagcacttttctttcaaataccttaaaaaagaaatgtgaagagagtgattctgagtcacctgctactttcagtaccgaagagccatcattctacccctgtacaaagtgcaatgtgaattttagggagaagaagcacctccacaggcatatgatgtatcatttagatgggaatagtcactttcgccatcttaatgtcccaaggccatatgcttgtagagaatgtggacggacatttcgagatcgcaattcacttctaaaacatatgattattcaccaggagagaagacagaagttgatggaggaaattcgtgaattgaaagaacttcaggatgaaggaagaagtgcacgattacagtgtcctcagtgtgtgtttggtaccaattgccctaaaacatttgtgcaacatgctaaaacccatgaaaaagataaaaggtactactgctgtgaagagtgtaacttcatggcagtgacagaaaatgaattggaatgccatcgaggcattgcacatggggcagtggtaaaatgccctatggtcacttctgatattgcccagagaaaaacacaaaaaaagactttcatgaaagactctgtagtaggatcatccaaaaaatcagctacctacatatgtaagatgtgtccttttactacttcagccaaaagtgttttaaaaaagcacacggagtacttgcattcatcatcatgtgttgattcatttggtagtcctcttggacttgataaaagaaaaaatgacatccttgaagaacctgtagatagtgatagcactaaaacattaactaaacaacagtcaaccacatttccaaagaactctgctttaaaacaagatgtgaagcgaacatttggatcaacctcacaatcaagtagtttttcaaaaattcataagcggccacacagaatacagaaagctcggaaaagcattgcccaatcaggtgtaaacatgtgcaatcaaaacagctctcctcataagaatgttacaattaaaagcagcgttgaccaaaaacctaagtatttccatcaagcagcaaaagaaaagtctaatgccaaggcaaatagccactatttgtatagacacaaatatgaaaactataggatgatcaaaaaatcaggtgaatcatatcctgtgcatttcaaaaaagaagaagctagttcattaaattctttacacctgttttcatcatcaagtaattctcacaacaattttatttcagaccctcataagcctgacgccaaaaggcctgaaagcttcaaagatcacagacgtgtagctgtaaagagagtaattaaggaatctaagaaggaaagttctgttggaggggaagacttggatagctatccagattttttgcataaaatgactgttgtcgttttgcaaaaacttaattctgctgaaaagaaagatagttatgaaacagaagatgaaagttcctgggataatgttgagttaggagactacactacacaggccatagaagatgaaacctatagtgatattaatcaagagcatgtaaatttattccctttatttaagagcaaagtggaaggtcaggagcctggagaaaatgctactcttagttatgaccaaaacgatggcttttattttgaatactatgaagatactggaagtaacaactttttgcatgagatacatgatcctcagcatttagaaactgcagatgcttcattgtcaaagcatagttctgtttttcattggactgatttgtctcttgagaagaaatcgtgtccttactgcccagcaacatttgaaacaggtgttgggttatcaaatcatgtcagggggcatcttcacagagcaggattaagctatgaagcccgtcatgttgtatcaccagaacaaatagccacaagtgacaaaatgcagcatttcaaaagaactggcacaggaacacctgttaaacgagttagaaaaggtaagttctccatggggatgatttgggctgataggtctgtgttctaattctgaagatttaaaagttttttttgaatttagtctttattagaatcataattttatgtttcagaattaactcattttagggtggtcagtttatataagaaagtctgatattactcttaaaaatttttttctagctatagagaagtctgaaaccacttctgaacacacttgtcagctctgtggtggttggtttgatactaaaattggattatcaaatcatgttagaggccacttgaaaagacttggaaagacgaaatgggatgctcacaaatctccaatctgtgttctgaatgagatgatgcaaaatgaagaaaaatatgaaaaaatcttaaaggcattgaacagtcgtcgtattattcccagaccatttgtagctcaaaaacttgcatcaagtgatgactttatatctcaaaatgttatacctcttgaagcataccgtaatggcctaaagactgaagctctgtcagtgtctgcatcagaagaagaagggctgaatttcttaaatgaatatgatgaaacaaaaccagaactgcccagtgggaaaaagaatcagtctcttacactcatagaacttcttaaaaataaaaggatgggagaagaaaggaattctgctatttctcctcaaaagatccataatcagacagcaagaaagagattcgttcagaaatgcgttcttccattaaatgaggatagtccgttgatgtatcagccacaaaaaatggacttgactatgcactcaggtaagaggacgtttatgactatgctatacacagtttaaatgcagttcaattatgccttctttaatggaatctatgtggaaaatactttctcacaatcttcctgtttaagctgctttttttttttacagagcacagattggttattctactgtcatttctgtataactcatcaattgatgctcattagcactgagttctctgtgcctcttttcttggtctgaatgtaaggtgagaacaaaagcagaagaaaaccacacacacacacaataaaaacaacaaacaaaaagctgatctgtaaaaataaaacttgctctggctggaggatggttgtggatgggaggttgatgttcaaaagcatagcattattgaaaaggcatacctctgtcatatttttgccagttctccaaggtgatcatgttttcaagatttagctgttggtttttccactgcttaggtaaaacaaaacagactcttaaagctgaatggattggtgtctgttgtgattaacccaaagaaacatctccctctccaattcctcattgtattgcggaatagtttggttttggagaacagttgtgaacataaaacatatttgtttggggttttaggttttaagatagtgctctaatggaacaggacagatgatttagcttagtgctggtgcaccaatagttttttccttttgaaaggaatattttgtatgtattggcaaataatgtggcagataaagtagccaaactttattcagtattgccaagtgtggtttatacttttagactagaaaaattttaagtgttttttctagatttctttttgaaggttaatgttgaaggtttatgtaaatggtctcatgattagagctctaagttgaatgtgtcagaggtaatagttaatggattaataacgactaacattactgtaaagtaatgttgtttatttgctttggggcagacattgtgatatcccaaatagttgtaatgcagttttgatttaaggaaagataactttgtattgtaagtggtctggaaagcagtttatcttgtatgagcttctgtttaatccggctttttctttcgaataaagagtctctgaaagtcaatagctttcaatattttttcagaagggtaaaacgcagggaagatgtgttagctgtgttgaccaaggggtagtatacttcagagatggaaagcatatttgtggctatcacagtaatgctgaagaaaccagttgaaatgtgttgggggagtgaggattgtctgagaagttaggagtttcttattgtttgaacatgtttttcctgtgatgactaagatgttagcttgttgatcatttatttagcacaaagattttagcaaaaaactttaaatcattaactttcattattgattgcgcattcagagtaatgaacataaaataccctaaataaaatgttgtgtctaacagctgttcagtggtgtgttttaccaccttttctcccagccttcatcagaaagcctaatttagtattgagacttttacggttttgtgggtaaaacactttaattaccactttgtcaactagactttttaattctttttattggtaatgttgtaagctttgaaacttctcaacagaaccgtgttgttcaaatcacaggattgtattgtagtaggtttaagaaataatctgcgtaacacagaaatctgcaagaaagtaataataggtgtatatccagaggagctcaaaggttcaagtcactcctcgtctacctttccaaagagcatgagttgactctaaatactaactacaaactaataacagttaacttaatttcccctccttattttaagttaacctatttcattgaacgttttgaaaaccatctttattgtggtgcttttctacactctttaagctaagaaaatttcactttttgaagtgagaactggattatagttttcttttgaatgataggtatgcctgtgaagcttagaacatgtgtgcattgcaatacgacgtttacaagtgctgttagcctgtccaaccacttacgcgcttatgcacgaaagaagagtgctggacttttgactggtacaggtatgtttgaacagatatcacagcaagtctgtttgatacaatacactttttttttccccaccagactggtgttaattcagatcatatttatagctttctttggtaagctgcatttgagtctgaatacccattgaatttcagcaacttgtaaactgttagatgtaattctaagcaagttaatctttttcttttggctcttattgacttaatttgggggaaaaaaaattaacccaagaggtgtggaactttgagtctaccttaatcccatttattttttagaatactatttttgatttttaaattgattttagattccagtaaaacacctctctttatagttctagtcgggctcagtggtgtgcccctatagtcccagctactcatgaggctggcaggaggatcacttgagctcaagagttagcggctataatgtgctatgattgtgcctgtgaatagtcactgcactccagcctgggcaacatagcataaaaatattgtagttctagcttggggaaatcctttattagaaaaggaaattatagggaaatttcaaaatgtagacttgattaggaaactaagcaaactaatgaattttcattagtctatagattagatctttgaaggggtgagccttaataatggcttgtgttgacaagcgaatagatttttcttttaatacttcttaaatatattaaggattaataaatttagctatgcacataagtgttaacatgcacatttctgtgttatttttggttggttagcccaaccttgcagatacctcttaatactgctcatctgtgaaaattttattagcttacttatatgtaatacgcttcttataacctacaaaatgctttgcactttcatttgtagtcttttaagctaccctgcttcagcaaatctcatttccctcacatcttaaaatataccctctttttgacatagatctacataaattcttttgcctaaaattctttccaatcattttatttctcttgctcttttttagatcactgcctcctgctttcttctagttgttttcccagcttttttgttcttcctcatgtcctagaacttagatccaatatgttcttgctttcaaaaaaccacttatatttatactagtgtctttcttctgcttctttgcattcttccttaacttgatatacaaatgaccagggatgaatgttgacaatttatattaaaaagagaggagtggggtgagttttagtctactggattaggcctcctactctgagattataatttttatataccctcacctttatcaggcttggcaagtgattgcagacattagaggtggggaacaataaaaataagagactatacaagtaggaaatcattattgttaccatacttgctaacttttattgaacatttactatgtgtcaggcactatgctatgcaatttacatgcataacatttaatctttacaacagccatacaagttgtaggtactggaattctcttaacgttttataggaaactaggacttaaagaacttaatttgctcaaacttacacagttaataagtagcaaggttgtaattcaaatcagggctatcttacctaatctttgtttttaatcactattctctaccttacacaggcggtctatttttgaatttcttatttttaaaataagaaattgaaataaaaataagcaatggaaaattctaaaatgaaggtgggtttgtttatttatttatttattttgagacggagtctcgctctgtcacccagattggagtgcagtggcgcgatctcggctcactgcaacctccacctccctggttcaagcaattcccctgcctcagcctcccgagtagctgggattacagactcatgccatcatgcctggcaaatttttttgtatttttagtagagatggggttttaccatgttggacaggctggtctcgaactcctgacctcaggcagtctgcccgccttagcctcccaaagtgctgggattacagccgagagccaccgcacccagcctgaaggtgggtttaaaatggggactattctggtgaagactgaataaataagagtctaattaaaaagagcagagatccaagaagtgcttaggcctaaattagactttagaggagttaatgttccattctgattattcaagcagattatgcaaatatccaataaggcaagatatctccagtccagattttattagtccattaaaaaaatgcttttacttcatctgaaaattctgcaaaacacaggattaattacttataaataactggtagtaaatctccatttaccaagaatgcacttatgaagattatctaaaaaatcttcattatcagagagaaaagtaatgtaggatgactgggaatatgtttaggtcctgaagaataaaagagggtgttattttaaaaatatgattaagtactaccaaaatattagaagtactaggaaatagaaagcgtgtgtttggcagtcctaggcaaagaaaaggaaaatgagaaactgaagaaagcctagggtcttattttccacacccagtagccacttttgagaaactttaaaaactaatgcttctttttcttggaaattctgaaacattttttccctcattaaaaaaaatcttcttgatcagtagagctatacagatgtctttgctgcttattcatgccaactaagaagttttttttcaagctttattaacttttctgttttccagatagagaattctgtattgtatttacaaactccacatactgattatcccccatatcaatatcactgttataaagcagtgttcctaaaaacctatggccctagaaggttccacttggttattataagtgattcattaattcatatgagtaacaggcatcatttttcaagaacacatgatcttttaatgaataaaatgcaaattcatttttataaaatcttaccttagtatatcacaaaattggaacaatgtaaagggaaagtagataggaataaagcctccctaaccatgtccagtatgtgtatttctagtttaagcagtcttaattcatgtagattttaagttgtgtggtccactcttgaatacaaagcttagataccctcagactaaatggtaaaggcctgcttttggttacctgtgatagaataaactttcaagccttcttagaagccacagctcctggtcttttctgtgggaactggtgaccttttgagggaagaaaaatatttcttctaacttataatctcttcaagtatcctgaatacactgaaaaggatatccctcttcttcccaaaatacctgtttactggtaacttaaatacttctaatgtgatggttctcaatctttactggggtcaccgacatctttgagaatttcatgaaagctgtgggccccatcccagaaacatgcacttatttgttctcagataaaaatttttgtgtgtatagactttgcgtatctcctgaaggctatcatcaatttgtctgatggcaaattgagaaaggagagatgccagaataaaaggaaagtagaaacagaactaggaatcagaagccttaagaagttcttttttttttaagagcagaagatgcttaaaatgcaagaattgcataatagcaaaactaattgtggggtcattatcttccctaatatttgtaaaaggaaccgatgggggaaataggaaagatttagaattgaagatttggaagaggtgggcagacttgggagagttaaattgtcataaaagaataatttcacagattaaagttttgcccagaactgtcccagtttatcttctgttgggtaggttcaaataaattgtttaataatttttctgtgtcttcacttgtagataatttatgaagctgttttacttcctttccccgatcaatctttatcaaaatagactagaatcaaagggtttattttatatcctatattgtaaatttaaggcagacttcttattcaagagtttattctagttatttatggaatgcagtaatggtaggggtttttttttttttgagattttgttctctttaatgttttacatgctcatacagatttttttctggttaattttccatacagtttaatgagaacattatatagttttcattaaatattgaaattttataatgtagcttatattaattacttctggactttttattttactgattagctttttttgtgcctaatgttttaattaaatgatgtatttttatgctagccatattaagaacatagttctattaagttattaatggagtgactatacatactggtttaccttgttgtcacacctaagtactagtgcctcttttactctcataagtgtcctggattgaatgataaattaatcatcctggttattaaaattgctaaagcatttaaaattaaggtaaagcatattctatcaacctaatctgcaatcaggaaaaaaaatatattttgaggtcaaaataagagtgaatttcaacaggtagggaaagggaaatacagagtagagagaatgttgttaaaggaagtagatctgtcagatgaatgccacaatgcttttctatggtagatagcatgttgttatcttttgtaaagaagaaacaatgatggtagcagtcagcattttaattgagactttattttatatcttgaccacatgtacaaacttacattaatacaaacacacaattccttgtgtactcacctaaatgtactttaatattttcttttttattatattctttgttgtgaaaaattaatgctggtcatgagccagtaaattgatttgctacccacttaagaagtcactatcatagattgaagacactgccctaactgcctctttctcttaggggttggtactgaccaatggtagtagtatcttagatgtcataactcttctgtggcagcaggtgaattttctatactcattctatccacatttttctctctagatcacttttgtaaatcaaatgctaacctctgggacttaaagtaattggaaatttctagttactcatttaaaattaatgcaagaaaaatatttttatatttgggaggggcttcatttcattatcttcagaacaattttgtgtgtgtgtgtgtgagacggagtttcactctagttgcccaggctggagtgcaatggtgcagtctcggctcactgcaacctctgcctcccaggttcaagtgattctcctggctcagcctcctgagtagctgggattacaggcacacgccatcacgcccggctaattttgtatttttagtagagatggggtttctccatgttggtcaggctggtctcgaactcctgactttaggtgatccacccgcctgggcttcccaaagtgctgggattacaggcgtgagccactgcacccagcccagaacactttcttgatacgttttggaagtaaagcccaattgttgctattctacaacaaatgacttatccatcataattatttgacttttctgatgaggtcaataccactagtgcaatatattaacgtttttaaaaaatcaagtcagtgttttatttttcataccatctacttttaagtgtaatcgtagtaggtttcttttgcctgttttcagctttaatgatataattggccacacaggactgtaacaagtactaatgaacatatagcacagtatcaagtgctgaatgggtttgtaagccactagaaaagtcattcttatgttgtggaaagtgctatgggagcactttctgatgtgatagaaaaaatagtattgtgaaagcttcccaatgtgcattaaattatttgttcattcatgagtgtcactgtagtgtcttttaaaaataatatagtattgcatgtttgaaaaattgcatgttttcatagtggttcattcagactgaaagagtgtaagtagaaaattttgatcttcttattaagattaaactccaaatgagcaaacttgcttctgcttaaagcaaactccttgacaattcttccagactgggctgaggagggtatgtgaaaagtatgagacatgtctctgctgtcagagaaattaggaaaggattgttgacaacatacataaaactatcaaaaattgaaaactatgcaagatagtatacaactaaatggcatattggctttaagtgttgtaggagttcaggttgattattttagtctaagcctccttttgagggcagctgggaattgagattccttttttttctgatgcccttactgtttgtctcattgaattagagcttgtaaaaaacagaaaaaataaataaataaaagtagttcatgctggtatgcttcttgtgactttttaaatgcaagagaacaacaaaaccagcagccatacaaaattttattcattcaacaaaagtttgagttcttgtaccaagactgttcatcgctgagccagtaaagatactgcactccagctgcataaacataatataacccagtgggaaaagatcaagtatgccattacagaagggtttatatggtttcagccagaccctgaagttgaaggatgcagtagagttttaggaagacgagatgaagtgtagaatatttcaggcagagaagaacatagtgtggacacaaagggatgaaatttggacttcaagtgtcaggagtggaacttggagttcaagtgtcagaagatttggttacagatgtttggtaaaattgtagtgccagaaaggtggggttggtgctttgaatgcttggtaaaaaaaattaggaagtcattaaaggatgttttaaaaataaggaggccgggcgtggtggctcacacttgtaatcccattactttgggaggctgaggcaggcacatcacctgaggtcaggagcgtgagaccatcatggtcaacatggtgaaaccctgcctctactaaaaaaaaatacaaagaactagccaggcgtggtggtatgcgcctgtaatcccagctattcaggaggctgaggcaggaggattgcatgaacccagaagctggaggttgcagtgagccgagattgtgccattgcattccagcctgggcaacaagagcaaaactcctcaaaaaaaaaaaaaaaaatcagcccagtgtggtggtgcgcgcctgtaatctgagctactcaggaggctgaggcaggagaattgcttgaacctgggaggtgcaggttgcagtgagccaagattgcgccactgcactccagcctgggcgacagagtgagactccgtctcataaataaatacaaaaggaaaataggccaggtgccgtggctaacacctgtaatcccaagcactttgggaggccgaggcaggcggatcacctgaggtcaggagtttgagaccagcctggccaacatggtgaaactccgtctctactaaaaaatacgaaaaagtagccaggcgtggtggtgggcgcctgtaatcccagctactcaggaggctgaggcaggagaatcgcttaaacctgagaggtggagattgcagtgagctgagatcatgctgttgcactccagcctgggcaacagagcaagactccatctccaaagaaggaaggaaggaaggaaagaaggaagtgaaggagggaggaagagagggagggcagagagagagagaagaaaaataagggaatggtatggttaaacttatattttaaaaagcctttcatgagacagagaaaagatgggtctttatatttcttagctataacttatttctatagtattgttcttcattaagagcatatatgtgtatacatttatctgcacagtaacgtatcatttataagtgattagcaaggtaacgaattatctgagttgagtaaattctctaggtgactgaagaatagtcctttaactgttaataacttgatttttcctaaccattttggtggttattgctccaaaatgttgttcttatttttgccttgagtagcttggatataatttaatcgagtattttgggtaacccttatagatactctactaattgttttattattccagcaagaattaggctatttctccaccatacaaaaaaatgatcggctgattttttcactaattcaacaagcacttttttcacctccaactgtgctaagtatgcagagatacattggatcttacaatacagtagaagcacatatatgcataactgtaatacaagacaaattgttaagtgccattggagaggtatgcgtgaaatactgtggaatttcagagaaagaggaagacactttcagctagactaggaactcccaaggcttttggaattagcatttgaatggaccctgatgtatagctaactgaaatggaaatgggggtcggggtggggaagagaaatgcctgaaagagggagcaaggtggaacaatgtgggaagtttataggaaatactaggaagtaggaggtaagggaattgagttggactggtaaagtgagtcagatagatgacatagaacgctagtctaagatgttggaattaactttgtagtggggaactatttgaatgcagaatttgtgtaatgcttttgaaattgctttttaaataaaggatttggcagagaggaggaaaaattgcagggtagatcattttaagagtcctgtaccaggtcagtgacattaagaatgtaaaggaggggtactagatgtatgggtaatattatggaaataaaataagcaggatatggtagattagagttaagagatgactcaagattttaaatctgagtgggaggaggatggttataccagtacagttaatcaatctgctaccatgctgtctggtagaagggcaggcttcattacttctctgtcatttactagcaacacttcaacatccagctatccactataacaaagtatcaccttaaaagcaggagatctacaaatttggaaaagagagctttatttcttaggaagcttgaagcctgcaggcttggaagtgtatcctcagacagagaccaaaagcaagcccttcaaaggaggaagggtgagacaggaagttatgttgaatgggttggctaagtatacatattcaacagattataggaggagctatgaatattcatgagggggtgcacacaagcttagtgtgcacactccatgttacatacatcccatgttcactttgagttggagacctaacatttaatcatagtaaaattaaggtttacatgtcaaaaggtgaaacagagttcataggcatcctatgtgcagccttcatggaccagctagaaccagttggtgatctcttatcagtaaggaatgctggtcagttcaaaaccacaaaaacagagtggagtctggcttctgagttaggcaattggttgatatcagtggggagcaagtcttttgaaagggttggtttctttttaactcttaggaaggaaagttttatggtggttagtgagggaggggacctaacgagacttgctttacctcctgtcccatcatggctgggaactcaatttttaaggtttctctggggtcaccttggcaaagaggagggtgtccattcagtctgctgtagaacttagaattttatttttatttctcaaaagcaaataaccacacttgttgaatcagtaagtttgtttttaggagaatatagcctaagagttacaccattgtagcataaaatacttaaattttatgatgcttgttttttgctgctcattggtttcataaggaaggtgatctattttgactgacatcttgtttttcatgcaagtcttatctagtttcctagcattactattggtttaattatttactaagtttctgggttttgcttttttttttttaatatatgtttgggaatcttaaatatatctaattatatcttcagttataatgtttgtgtttgctatgatttttattctctaagccttaaataatgagattcagaaaatatcattaggtatagagtttattcaagcccaaagcttgaggatggccacctgggagcataggttcaagttgccctggatatacactgtgattagcagcagttacaagtgaatttttaagaaaaaaagcggtttctatgtttatttaccaagaatttacattaagataacgtaagctatcgattggctatacattgttctttgtatcacagatttcaggaacataaaaataatgggtgaggcatcaggtcaggaacataatgaatgcctagtttaaacaattgccctccccccagtggggggcatgagagtcaagtgactgaagtcccctactccagtctttctgggcctggtaaatcttgcatactgtgcatagctgactgctgagctgctttccttctctctaacatgaatttcttgaatgcggtttgtaatctggattaagatagaattagcccttataatataacaaggcatgtggttggccagagctaaattttaggtaatgttttaattgactttacggaaataataaaataacactcagactttctctattggaggttagggcaaaaggatggcttattggtaggtagttcctcacttactgcagaagtagaaaaaagtagaaaagtagaatttacttttttttttggtatgcctagggtttgaagaatgaggttaattcttgttatccaaggtttatgtatttaattgtagcttagctggaagttggctaaaacagaaaatatctgatcaataccatgtttggttatagtttgaattttggctggaattacacgtgtaaggctcttgagaactataaaaagccaaatcagatccattgcgaccatggatttgtgccatttagatttactaatatattgttgtgagtcctatctaatttaaggtaaatatgattgtattgaaaataatttaaaggaaattttaaagttaggtggttttcttagctaattttatgatcaagaacaatttaattattgttactacatctgaaatgatatatcagaaatacggagattttagagggcagggactgtgattattttgtttgtaattctcaacaaaagtgacttaaagcagattgtcattatgtactttaatgtttattctaatttcagatgtgtcttacaaaagtggttgatgttgatggctaatgcctattttgcttaataaaacggcatacaagtccaacttacttgaaaagaaatttttaaatgttattttcttacctgtcaccacaaagaagtaatacgtttgctatcctatcaactcagctgaccagtaagccacttgtagttgtgatattgttagcttttttagctttgggtaagctgataaaactagcctgcctctaattcctgtttataaaaatgtgtgatgaagtatcatatttatgtccagcttttccctttatttacatagagaatacttgctcaaaataccctttagtaatcatcccctctactttgaaatagtggagtcttctacaaattgtactttttctttaactgaatccattcaagtttaaataaaaggctacttccatttcctttaactctttctctgaactataaggctgttgactatacttaatttaacttcctactttgtaggacaaactcaagcaaccagtccttgtggactaataattgtaaaaccacaaacctaattcttaaagcaaaggaaatctgctttccaggtattttgcatttcatcctcttccaggtaaattattaaaacaagcaggaactagttaactttgccactgattgctgtgtgattgagttacttatctttttttcagtcattgggagtggaaactctaaaaattaatgaaagttatttagggtactaaaaaattacccaattttagagtgaaaatatcaagggaaaatgttgatgaaaataaatacttttgaggtgaccaaatgtgtatctttatacttcatgcctgactgtaagggaaacattgctttttataatgtaaactactcatcttgggaataatgaagtggtatagctaggagcaaagaactgatgttgataggagtaggggagtccttttcaattttaatactgtgtagagtggggatttaacaatttttctcagcctttttttttccttttttgaatgggccgagagattgaggggtggaactgaatgcagcctttctcatttatgatagtagatactcaggtcccagggctgctatttgcaaagtccaatgcaaaatgagttatgtggtagacctcgttcaaaaattaatagttgcaaggctgcaacagtagagcattaaactgagtgtggggctctccctatgtgactgtgtaagttggacacccatgaagctggtctcctaggcactttgtacagaaagaaagataaaagctgaataaatgaaactttggcttctcagcaattggctttctctaccccattcctgttttacacaagctagcatgtttttgttgttgttgttgttttctaaaaaaaggccctgattctttttcatttgaggccaaaggaaagaaaattatatttgcagtctttttatatgcttggggcttatgaaccttgaaggattagtgacaacagttataattgaatttattactaacacaggaacagaaaaccaatactgaatgttttcacttataagtaggggctaaacaacgagaacacatggacacaaagaagggagcaacagactggggcctaccttaagggtggagggtaggaggagggagataataaaaaaaactacctatcaggtactgtgcttattgcctgggtgatgaaatagtctgtacaccaactcccgtgacaatttacctatataacaaacctgcacgtgtacccctgaagttaaaataaaggtttaaaaaaaagagttgagtttatttttcttacacttgtgtatcctttggcatgtgtgcatcctcttcccacctcaccactgccagcacgacctccagcaccaactttttaatagtgatagaatgatgatttacctgttcgtgtcatgtttattcctactgtagttctgaatgagctcatagctaatattgtccaccaaacttaacacaggccaaccacttagagaagaaattttcttccctctcgtaggggtatactgtgcctcttactttgggtatagataccccagttgtttcactttgtcctagagataccagcaaccaattagaaaagaaatggattaaacaagacttttaagttattgggcaggtgagaatgattacaaataaaaatacttcggtggcgaatgttaatttagttatggtgtgctttatcaaagaagttccagatgtttttatgaaatctcattctcttgggtcatttatatcgtgaaggaaaaagaaaatgaaactcattgaagcaattattgtataaaatgggcagaaaggtggaaagagcaaaagattttaatgtcaaagtcaaaagtaaattcttaatcttctttgtataaaactaaataatggctcagaaaacagacttgaatttttatgtgttgtgttatctatttatttgctttgcaccaatctggtttagtgctttggcatgttgttgtcgtcatggtcattggtcgtcgtattcatagcatagcagtgtggtgttctttttgaggactcatgagtttattgtatttctctttcatatttgtatttgaccaagacaaatatcttactgaaaggtatattctattttttttttttgcatttgaccttacagctcaatttattctccgtatgagtaaaatattctcagtagcaatttagatcttttataaatcaggtaacttgaaagataacagtcttttggttgaaattgatcacttaaacagtttctgcccaccgaatagtaatcttaggaaggtttggatgactggatttgtttctttctatagaagcttatgcttgagaagaaaattaatactttctaaaaataattttttaatatatttaaagtatagaaacaatgttagatttaaaatactttgtaaagagaaaagagtgtgtgggttttttgtttttaagttccttggagttttttggtcactaacaagtgcaaataaaatcctattacaaaaaaaggctttgtgtaacagttatctatttggcagattattcatataaacaactctgttaaagctttggctgtttatcacagatactgatgagctgcattatattaaaactgaatgtgttagtgatctgtatttaatgttctagtggctcctggtacagtccagaacaaaactacttttccctctagatataataaaatctcttaagtgagaatattggtataacagacatgtttctacctcatccttttcatttattgaaattttctgtgtaaatcatccttttatgtagaggatcctatatagatgtcccctttttgtgcagttttaatatgttaaatactcaattttaaacagattttcccaaaggtatgggcagtatcacaggagtgggtttggatattggcattagaaaaactattgtaaaatatgttcatgtttcacctgctcaaaaatataacatttcaggagataataaatctagaattgatgaagatattaaaacactgaggcatttagatttcaatttccaaagttcccagatttttaatattttaactttgtgaataagtttctagggattctcagtgcatgagattctgtaaccttaactttggagccctgggttctagagatgattgatcagtcataagctggcagagttgtcctgctttccaaggttataataccttcaaatactcattgctacaaaaatgatggcattctcatttcaagtttagatctgatcattcataaaacagcctaaacttaagagtttccacagtccataaagcatcaaaagccataaaataattcttttttccctattaaagaaaaagccaaaaatatttctgtattttagaataaacatttccagttccatttttaaaatattaacaacatgtaaatttaaatgcttttgtaactgataaaatgttcttttgcatatttccctaccatcctcctgcccttcttcctcaatttgctttacacccctaacattaacattctgtgaacaaatttttaagggttgttataatgtattctatttgtatcctacagtaatttatttgcattttaaaaggagtttgaatacagtgtggcaattttgacaaccagcaagctcatcaaagtaagattctacctgtaatcttatgatacaccaaatgcctgctctattctgcctaacacagacaaggatccatctttacagatggaaagaatagctgacatctagtagcacttactctttgagttccctgaactctatttctagtgtatgaatcactcataacccacttaaattcagattgctcaccaaagcgattaggaaaaaggtttttcctactgggtacaaagcataaggtatttcactcttgtagttgttgtgaataacctagtttctgtacataagctggctggtcagtgatttatatctaggataatgaagtatgtgtgactgcagcaacatatttaaacaaatgatgcacaatgttgtacaggaatattacctgtattaaataggagtaaaacattttcattcataggctgtctaaatatcaatggttaaattactgagttttgctttatttttactccagaagtatttgttgagttcctactacatgcgaggctcttgactgagataactaataagatccttataagatttttctattccagagtttggttgtttagctttgaattacccattctttaatacctaacttgacttctagtagttctttacttattagactcttcttctaaggataaacagaaaaagactgtgtcctagattttacttttgaataggcaggtgacaggaagctgaaaccagtggcttcaatgagatttaggtttcttgtggttttgaattttctatatgacatttctgttatcattgccatttgactaaggaactatgtttactggttttgtaatagtagcatctattcttttggaatctggactttgaacaattcgtttcacagagtcattgaacagccagttccttctctcttacttagaatttttccagggaatttttcacatggcaggataatggaagaaaagccatttgggtaactcttctgttacatttgtatccctccccccttggatccctacagataaattcttaccttctcttcctgctaattgaccagcagcaccctggattgctatcatccctttgtccaaagaaatggtgtagctgtattcaaagacctataaaatgttatgtgctatctattgctacctataaaaaatacctttttttctttttaaaatcaggttgttttagaataaataaaggaaaagtcaattaatggaaaaatttcaagaacagttcacataaaattttggtctattttaatttttttttttaccttttcaaatcacattttaaaataagcagttggagaaaatgtaaaatgaaaaatatgtaaagaatagttagcattaaacatcagatccaattgtaaacttacgtgagataatatggatttatatttattttctagtaaaataaaacttatatgattgcataattgattattgtatatgcaatacaaattaagttcaaaaatgaaagttgagctttttttgtcctttcaaatgtagggccagcatacaattttaagagctatttattataaaattcatggtgaatcactatgaaaattgatttttccttgagcttttaattacattatccatattcccttacgaagttttccaagtatagaagacctacttaatggagcagtaatcaaatgcaaacttaatttaatgatctcaaataaaaggttctacttttctggaaataagattaaaccagatattaaaattatgtatgattataaaagtaaagattaccattattgtaataattgaccaatttagtactttcaagttatttagttacattttctcagttctagtttggtgtggtaaagcattatttgaaaaggcagtataggaagaatacagatagtattcttcagtacagataataccgctgtacagtacagataatattactgctattacagaatcagcaagttgaatgcatgcttcagggaatagggacatgaatgcggactttttctaactgacttagatggtctgtctgacctctctagaaaaatatgtgtgtatgtatattttgaaatatataaggaatgttaagtctttctcttcccctttttagccttagattgtaagcaaaagaaatcaaggtcaagatctggaagcaagaagaaaatgctaacattacctcatggtgctgacgaggtttacattctccgatgcaggtatatgcctatattgccaaatctgatcagtttcttcatactttgctttgaaacatattagctatttcatttgggatttttaatttgtggcagagtgcattctcaacaatcaagttataaatgaacttttggagataggcttaaaatcttaattcagctcacaatatccgtacttcaacaactaatgaatcaagttttttacattagccaatagtaatgtaaatctattatactgtgatttattaaagtagcttggccaggtgtggtggctcatgcctgtaattccagcactttgggtggccaagatgggtggatcacttgaggccaggagttcaagagcagcctggccaacatgatgaaacctcgtgtctactaaaaataccaaaattagccaggctttgtagcgggtgcctgtaatcccagctacttgggaggctgaggcaggagaattgcttgagcccaggaggcagaggttgcagtgggccgagatcgtgccactgcactccagcctgagcgacagagcaagactctgtctcagaaaaaagaaaaaaaaactggctttccttgtgtttatttggtttgtatggtttaattttgtttggtttgatgttttgttgtcttgagttctcgcttattgggaacacattttctctcccctcatagtcacgccttcttccgtactcacactcacacacaacacacatgaagaaacatagacacaatgccatttaaggaatgctaaactggggaagggtcttttctaaagaatgacatattttggagtaatagttgttgtttcaagtgaattaagatgtgtagatgttaattttaaaataataatgctcccacctatacaaagattactggagtttattatagctgttaataaacatatgaattgggagttttgatgttttattaaatcatttgactttagaaactttatcaattgctgtctttaaaatatgataaagtttattccttatgttttaggattttgtgtgaattagttttaaagaaagagaattggtcatgttaagagaattgttatctttctgtaggttttgtggcctagtctttcgaggacccttgtctgttcaggaagactggattaagcacttacaacgacatattgtaaacgctaatcttccacggactggagctggcatggtggaagtcacgtcactacttaaaaagcctgcctccattacagaaacttcattttctctactaatggccgaagcagcttcatagaaccaggaaaccttttaaatagccagtttgaattggatgtaaatttgaaattctttttttttaagccacattaaattatctgtttataaatactaaagcaggaaaatggggggaaagtgaattacagtgacatcagagcaaattgaatacttaaaacagtaagtagtctatatattttatatagggtggaagatgtgtttttaaggtttatgaagttttgttggttaactgtgttcactcagtaaaagagcagtacatgtaagcagccattaataaactgttgcacatggatacttatagacagacttattggacaattatgttttttgcagtgttaccagaatcaaggctctgtttattccccacaagacttgcatagaaaaataagatattatattttgtttgtatgtatttagtgttttgtataataccaagaaccgctgactaaatttactcaaattagggcattaaatatcatgtacttcatagtttgagactgttcactcaaatagggcagagtactattctatctagatgtgtaagtgttttttttaaaatcacatggaacggttttttttatactaaaaagtggagggagatttgtttaaacaagtatttctaaaagaaatatgtacatagttctggaaattatttgtggtaaggaaatattctttactccagttgcatttctcagacaataaagtggtgcatccatgctacctcctactttgtcaacaaagatgctatttaccctttacatttttgtatcataatagattttaaaaatctaatgttctttattgcaagacattcttttgttaacaggtttgtttctttttaatgttttacctaaaatttgacatgcttacaggacaggtttgcctcttactttatttaacattgtagaaatgtaattaataaacaatgctcactacacagtttagaatagacgttctcatttatattatcttccaaatttgatcagttagcaaaacttaatacaccaattaaaatatttctacatatgagaatgtttacaatttaaattttagaacttgttttggatgtgattatatgtacgaaaatcgtgtaacactatgctcatgctaagaaccgacataacagaattactgaaataaatgtgctgtgaggaatggaaaatatggtgcaggtgtcttggtcatgataaattgtgattctttttaaaaattttttccaaaaacaattaggtattttaatctgaaatcagattcctttacaaacaacaagtttttgtatgcaagcaccattttatttcatgtagtatggctaatactatagttgaaccaaggatatgcattgattctttgcttcgtatgtaaataaagttaaaaacagttaaaataaggagtattttggtagagtatatacatacctcactgccagtgaaattgctttcctatggtatatctccttaccagaaaaatctctaaataaaaaaaggtttaaagaaaattaaaatgtgaaa

SEQ ID NO: 1963 - DNA, 26006 bp, Homo sapiens
tgtgttaaatgggcttgccaacaatatggatgatttgaagataaacaccgatattactggtgctaaagaagaactcctagatgacaacaattttatctcagacaaagagagcggagttcataagccaaaagattgtcaaacatcatttcagaaaaataatacgttgactctgcctgaagaactgtcaaaggacaaatctgaaaacgccttaagtggaggccagtctagtctatttatacatgctggtgctcctactgtttctagtgaaaactttatcttgcctaaaggagctgctgttaatggaccagtttcacactcctccttaactaagacttccaatatgaataaaggcagtgtttcattaaccactggacagcctgtggatcagccaacaacagaatcttgttcaactttgaaggtagcagctgatcttcagctgtctacaccacagaaagcaagtcaacaccaagttttatttttgttatcagatgtagcacatgctaagaatcccacccattccaataaaaaactacctacctctgcttcagttggttgtgacattcagaattcagtagggagtaatataaagtcagatggcactttaataaatcaagtagaggtgggtgaggatggtgaagatttattggtgaaagatgattgtgtcaatacagtaacgggaatttcctcaggtacagatggatttaggtcagaaaatgatacaaactgggatccccaaaaagagttcattcaatttcttatgactaatgaggaaacagtagataaagctccacctcattctaaaataggtctagaaaaaaaaagaaagcgaaaaatggatgtaagcaagataactcgttataccgaggattgctttagtgattctaattgtgtacccaataaatcaaaaatgcaagaagtagactttctagaacaaaatgaagagctacaagcagtagactcacagaaatatgcattatcaaaagtgaagcctgaatcaactgatgaagacttagaatctgtggatgccttccaacatctaatttataacccagataagtgtggagaagagagttcacctgttcatactagcacttttctttcaaataccttaaaaaagaaatgtgaagagagtgattctgagtcacctgctactttcagtaccgaagagccatcattctacccctgtacaaagtgcaatgtgaattttagggagaagaagcacctccacaggcatatgatgtatcatttagatgggaatagtcactttcgccatcttaatgtcccaaggccatatgcttgtagagaatgtggacggacatttcgagatcgcaattcacttctaaaacatatgattattcaccaggagagaagacagaagttgatggaggaaattcgtgaattgaaagaacttcaggatgaaggaagaagtgcacgattacagtgtcctcagtgtgtgtttggtaccaattgccctaaaacatttgtgcaacatgctaaaacccatgaaaaagataaaaggtactactgctgtgaagagtgtaacttcatggcagtgacagaaaatgaattggaatgccatcgaggcattgcacatggggcagtggtaaaatgccctatggtcacttctgatattgcccagagaaaaacacaaaaaaagactttcatgaaagactctgtagtaggatcatccaaaaaatcagctacctacatatgtaagatgtgtccttttactacttcagccaaaagtgttttaaaaaagcacacggagtacttgcattcatcatcatgtgttgattcatttggtagtcctcttggacttgataaaagaaaaaatgacatccttgaagaacctgtagatagtgatagcactaaaacattaactaaacaacagtcaaccacatttccaaagaactctgctttaaaacaagatgtgaagcgaacatttggatcaacctcacaatcaagtagtttttcaaaaattcataagcggccacacagaatacagaaagctcggaaaagcattgcccaatcaggtgtaaacatgtgcaatcaaaacagctctcctcataagaatgttacaattaaaagcagcgttgaccaaaaacctaagtatttccatcaagcagcaaaagaaaagtctaatgccaaggcaaatagccactatttgtatagacacaaatatgaaaactataggatgatcaaaaaatcaggtgaatcatatcctgtgcatttcaaaaaagaagaagctagttcattaaattctttacacctgttttcatcatcaagtaattctcacaacaattttatttcagaccctcataagcctgacgccaaaaggcctgaaagcttcaaagatcacagacgtgtagctgtaaagagagtaattaaggaatctaagaaggaaagttctgttggaggggaagacttggatagctatccagattttttgcataaaatgactgttgtcgttttgcaaaaacttaattctgctgaaaagaaagatagttatgaaacagaagatgaaagttcctgggataatgttgagttaggagactacactacacaggccatagaagatgaaacctatagtgatattaatcaagagcatgtaaatttattccctttatttaagagcaaagtggaaggtcaggagcctggagaaaatgctactcttagttatgaccaaaacgatggcttttattttgaatactatgaagatactggaagtaacaactttttgcatgagatacatgatcctcagcatttagaaactgcagatgcttcattgtcaaagcatagttctgtttttcattggactgatttgtctcttgagaagaaatcgtgtccttactgcccagcaacatttgaaacaggtgttgggttatcaaatcatgtcagggggcatcttcacagagcaggattaagctatgaagcccgtcatgttgtatcaccagaacaaatagccacaagtgacaaaatgcagcatttcaaaagaactggcacaggaacacctgttaaacgagttagaaaaggtaagttctccatggggatgatttgggctgataggtctgtgttctaattctgaagatttaaaagttttttttgaatttagtctttattagaatcataattttatgtttcagaattaactcattttagggtggtcagtttatataagaaagtctgatattactcttaaaaatttttttctagctatagagaagtctgaaaccacttctgaacacacttgtcagctctgtggtggttggtttgatactaaaattggattatcaaatcatgttagaggccacttgaaaagacttggaaagacgaaatgggatgctcacaaatctccaatctgtgttctgaatgagatgatgcaaaatgaagaaaaatatgaaaaaatcttaaaggcattgaacagtcgtcgtattattcccagaccatttgtagctcaaaaacttgcatcaagtgatgactttatatctcaaaatgttatacctcttgaagcataccgtaatggcctaaagactgaagctctgtcagtgtctgcatcagaagaagaagggctgaatttcttaaatgaatatgatgaaacaaaaccagaactgcccagtgggaaaaagaatcagtctcttacactcatagaacttcttaaaaataaaaggatgggagaagaaaggaattctgctatttctcctcaaaagatccataatcagacagcaagaaagagattcgttcagaaatgcgttcttccattaaatgaggatagtccgttgatgtatcagccacaaaaaatggacttgactatgcactcaggtaagaggacgtttatgactatgctatacacagtttaaatgcagttcaattatgccttctttaatggaatctatgtggaaaatactttctcacaatcttcctgtttaagctgctttttttttttacagagcacagattggttattctactgtcatttctgtataactcatcaattgatgctcattagcactgagttctctgtgcctcttttcttggtctgaatgtaaggtgagaacaaaagcagaagaaaaccacacacacacacaataaaaacaacaaacaaaaagctgatctgtaaaaataaaacttgctctggctggaggatggttgtggatgggaggttgatgttcaaaagcatagcattattgaaaaggcatacctctgtcatatttttgccagttctccaaggtgatcatgttttcaagatttagctgttggtttttccactgcttaggtaaaacaaaacagactcttaaagctgaatggattggtgtctgttgtgattaacccaaagaaacatctccctctccaattcctcattgtattgcggaatagtttggttttggagaacagttgtgaacataaaacatatttgtttggggttttaggttttaagatagtgctctaatggaacaggacagatgatttagcttagtgctggtgcaccaatagtttttccttttgaaaggaatattttgtatgtattggcaaataatgtggcagataaagtagccaaactttattcagtattgccaagtgtggtttatacttttagactagaaaaattttaagtgttttttctagatttctttttgaaggttaatgttgaaggtttatgtaaatggtctcatgattagagctctaagttgaatgtgtcagaggtaatagttaatggattaataacgactaacattactgtaaagtaatgttgtttatttgctttggggcagacattgtgatatcccaaatagttgtaatgcagttttgatttaaggaaagataactttgtattgtaagtggtctggaaagcagtttatcttgtatgagcttctgtttaatccggctttttctttcgaataaagagtctctgaaagtcaatagctttcaatattttttcagaagggtaaaacgcagggaagatgtgttagctgtgttgaccaaggggtagtatacttcagagatggaaagcatatttgtggctatcacagtaatgctgaagaaaccagttgaaatgtgttgggggagtgaggattgtctgagaagttaggagtttcttattgtttgaacatgtttttcctgtgatgactaagatgttagcttgttgatcatttatttagcacaaagattttagcaaaaaactttaaatcattaactttcattattgattgcgcattcagagtaatgaacataaaataccctaaataaaatgttgtgtctaacagctgttcagtggtgtgttttaccaccttttctcccagccttcatcagaaagcctaatttagtattgagacttttacggttttgtgggtaaaacactttaattaccactttgtcaactagactttttaattctttttattggtaatgttgtaagctttgaaacttctcaacagaaccgtggtgttcaaatcacaggattgtattgtagtaggtttaagaaataatctgcgtaacacagaaatctgcaagaaagtaataataggtgtatatccagaggagctcaaaggttcaagtcactcctcgtctacctttccaaagagcatgagttgactctaaatactaactacaaactaataacagttaacttaatttcccctccttattttaagttaacctatttcattgaacgttttgaaaaccatctttattgtggtgcttttctacactctttaagctaagaaaatttcactttttgaagtgagaactggattatagttttcttttgaatgataggtatgcctgtgaagcttagaacatgtgtgcattgcaatacgacgtttacaagtgctgttagcctgtccaaccacttacgcgcttatgcacgaaagaagagtgctggacttttgactggtacaggtatgtttgaacagatatcacagcaagtctgtttgatacaatacactttttttttccccaccagactggtgttaattcagatcatatttatagctttctttggtaagctgcatttgagtctgaatacccattgaatttcagcaacttgtaaactgttagatgtaattctaagcaagttaatctttttcttttggctcttattgacttaatttgggggaaaaaaaattaacccaagaggtgtggaactttgagtctaccttaatcccatttcttttttagaatactatttttgatttttaaattgattttagattccagtaaaacacctctctttatagttctagtcaggctcagtggtgtgcccctatagtcccagctactcatgaggctggcaggaggatcacttgagctcaagagttagcggctataatgtgctatgattgtgcctgtgaatagtcactgcactccagcctgggcaacatagcataaaaatattgtagttctagcttggggaaatcctttattagaaaaggaaattatagggaaatttcaaaatgtagacttgattaggaaactaagcaaactaatgaattttcattagtctatagattagatctttgaaggggtgagccttaataatggcttgtgttgacaagcgaatagatttttcttttaatacttcttaaatatattaaggattaataaatttagctatgcacataagtgttaacatgcacatttctgtgttatttttggttggttagcccaaccttgcagatacctcttaatactgctcatctgtgaaaattttattagcttacttatatgtaatacgcttcttataacctacaaaatgctttgcactttcatttgtagtcttttaagctaccctgcttcagcaaatctcatttccctcacatcttaaaatataccctctttttgacatagatctacataaattcttttgcctaaaattctttccaatcattttatttctcttgctcttttttagatcactgcctcctgctttcttctagttgttttcccagcttttttgttcttcctcatgtcctagaacttagatccaatatgttcttgctttcaaaaaaccacttatatttatactagtgtctttcttctgcttctttgcattcttccttaacttgatatacaaatgaccagggatgaatgttgacaatttatattaaaaagagaggagtggggtgagttttagtctactggattaggcctcctactctgagattataatttttatataccctcacctttatcaggcttggcaagtgattgcagacattagaggtggggaacaataaaaataagagactatacaagtaggaaatcattattgttaccatacttgctaacttttattgaacatttactatgtgtcaggcactatgctatgcaatttacatgcataacatttaatctttacaacagccatacaagttgtaggtactggaattctcttaacgttttataggaaactaggacttaaagaacttaatttgctcaaacttacacagttaataagtagcaaggttgtaattcaaatcagggctatcttacctaatctttgtttttaatcactattctctaccttacacaggcggtctatttttgaatttcttatttttaaaataagaaattgaaataaaaataagcaatggaaaattcgaaaatgaaggtgggtttgtttatttatttatttattttgagacggagtctcgctctgtcacccagattggagtgcagtggcgcgatctcggctcactgcaacctccacctccctggttcaagcaattcccctgcctcagcctcccgagtagctgggattacagactcacgccatcatgcctggcaaatttttttgtatttttagtagagatggggttttaccatgttggacaggctggtctcgaactcctgacctcaggcagtctgcccgccttagcctcccaaagtgctgggattacagccgtgagccaccgcacccagcctgaaggtgggtttaaaatggggactattctggtgaagactgaataaataagagtctaattaaaaagagcagagatccaagaagtgcttaggcctaaattagactttagaggagttaatgttccattctgattattcaagcagattatgcaaatatccaataaggcaagatatctccagtccagattttattagtccattaaaaaaatgcttttacttcatctgaaaattctgcaaaacacaggattaattacttataaataactggtagtaaatctccatttaccaagaatgcacttatgaagattatctaaaaaatcttcattatcagagagaaaagtaatgtaggatgactgggaatatgtttaggtcctgaagaataaaagagggtgttattttaaaaatatgattaagtactaccaaaatattagaagtactaggaaatagaaagcgtgtgtttggcagtcctaggcaaagaaaaggaaaatgagaaactgaagaaagcctagggtcttattttccacacccagtagccacttttgagaaactttaaaaactaatgcttctttttcttggaaattctgaaacattttttccctcattaaaaaaaatcttcttgatcagtagagctatacagatgtctttgctgcttattcatgccaactaagaagttttttttcaagctttattaacttttctgttttccagatagagaattctgtattgtatttacaaactccacatactgattatcccccatatcaatatcactgttataaagcagtgttcctaaaaacctatggccctagaaggttccacttggttattataagtgattcattaattcatatgagtaacaggcatcatttttcaagaacacatgatcttttaatgaataaaatgcaaattcatttttataaaatcttaccttagtatatcacaaaattggaacaatgtaaagggaaagtagataggaataaagcctccctaaccatgtccagtatgtgtatttctagtttaagcagtcttaattcatgtagattttaagttgtgtggtccactcttgaatacaaagcttagataccctcagactaaatggtaaaggcctgcttttggttacctgtgatagaataaactttcaagccttcttagaagccacagctcctggtcttttctgtgggaactggtgaccttttgagggaagaaaaatatttcttctaacttataatctcttcaagtatcctgaatacactgaaaaggatatccctcttcttcccaaaatacctgtttactggtaacttaaatacttctaatgtgatggttctcaatctttactggggtcaccgacatctttgagaatttcatgaaagctgtgggccccatcccagaaacatgcacttatttgttctcagataaaaatttttgtgtgtatagactttgcgtatctcctgaaggctatcatcaatttgtctgatggcaaattgagaaaggagagatgccagaataaaaggaaagtagaaacagaactaggaatcagaagccttaagaagttcttttttttttaagagcagaagatgcttaaaatgcaagaattgcataatagcaaaactaattgtggggtcattatcttccctaatatttgtaaaaggaaccgatgggggaaataggaaagatttagaattgaagatttggaagaggtgggcagacttgggagagttaaattgtcataaaagaataatttcacagattaaagttttgcccagaactgtcccagtttatcttctgttgggtaggttcaaataaattgtttaataatttttctgtgtcttcacttgtagataatttatgaagctgttttacttcctttccccgatcaatctttatcaaaatagactagaatcaaagggtttattttatatcctatattgtaaatttaaggcagacttcttattcaagagtttattctagttatttatggaatgcagtaatggtaggggttttttttttttgagattttgttctctttaatgttttacatgctcatacagatttttttctggttaattttccatacagtttaatgagaacattatatagttttcattaaatattgaaattttataatgtagcttatattaattacttctggactttttattttactgattagctttttttgtgcctaatgttttaattaaatgatgtatttttatgctagccatattaagaacatagttctattaagttattaatggagtgactatacatactggtttaccttgttgtcacacctaagtactagtgcctcttttactctcataagtgtcctggattgaatgataaattaatcatcctggttattaaaattgctaaagcatttaaaattaaggtaaagcatattctatcaacctaatctgcaatcaggaaaaaaaatatattttgaggtcaaaataagagtgaatttcaacaggtagggaaagggaaatacagagtagagagaatgttgttaaaggaagtagatctgtcagatgaatgccacaatgcttttctatggtagatagcatgttgttatcttttgtaaagaagaaacaatgatggtagcagtcagcattttaattgagactttattttatatcttgaccacatgtacaaacttacattaatacaaacacacaattccttgtgtactcacctaaatgtactttaatattttcttttttattatattctttgttgtgaaaaattaatgctggtcatgagccagtaaattgatttgctacccacttaagaagtcactatcatagattgaagacactgccctaactgcctctttctcttaggggttggtactgaccaatggtagtagtatcttagatgtcataactcttctgtggcagcaggtgaattttctatactcattctatccacatttttctctctagatcacttttgtaaatcaaatgctaacctctgggacttaaagtaattggaaatttctagttactcatttaaaattaatgcaagaaaaatatttttatatttgggaggggcttcatttcattatcttcagaacaattttgtgtgtgtgtgtgtgagacggagtttcactctagttgcccaggctggagtgcaatggtgcagtctcggctcactgcaacctctgcctcccaggttcaagtgattctcctggctcagcctcctgagtagctgggattacaggcacacgccatcacgcccggctaattttgtatttttagtagagatggggtttctccatgttggtcaggctggtctcgaactcctgactttaggtgatccacccgcctgggcttcccaaagtgctgggattacaggcgtgagccactgcacccagcccagaacactttcttgatacgttttggaagtaaagcccaattgttgctattctacaacaaatgacttatccatcataattatttgacttttctgatgaggtcaataccactagtgcaatatattaacgtttttaaaaaatcaagtcagtgttttatttttcataccatctacttttaagtgtaatcgtagtaggtttcttttgcctgttttcagctttaatgatataattggccacacaggactgtaacaagtactaatgaacatatagcacagtatcaagtgctgaatgggtttgtaagccactagaaaagtcattcttatgttgtggaaagtgctatgggagcactttctgatgtgatagaaaaaatagtattgtgaaagcttcccaatgtgcattaaattatttgttcattcatgagtgtcactgtagtgtcttttaaaaataatatagtattgcatgtttgaaaaattgcatgttttcatagtggttcattcagactgaaagagtgtaagtagaaaattttgatcttcttattaagattaaactccaaatgagcaaacttgcttctgcttaaagcaaactccttgacaattcttccagactgggctgaggagggtatgtgaaaagtatgagacatgtctctgctgtcagagaaattaggaaaggattgttgacaacatacataaaactatcaaaaattgaaaactatgcaagatagtatacaactaaatggcatattggctttaagtgttgtaggagttcaggttgattattttagtctaagcctccttttgagggcagctgggaattgagattccttttttttctgatgcccttactgtttgtctcattgaattagagcttgtaaaaaacagaaaaaataaataaataaaagtagttcatgctggtatgcttcttgtgactttttaaatgcaagagaacaacaaaaccagcagccatacaaaattttattcattcaacaaaagtttgagttcttgtaccaagactgttcatcgctgagccagtaaagatactgcactccagctgcataaacataatataacccagtgggaaaagatcaagtatgccattacagaagggtttatatggtttcagccagaccctgaagttgaaggatgcagtagagttttaggaagacgagatgaagtgtagaatatttcaggcagagaagaacatagtgtggacacaaagggatgaaatttggacttcaagtgtcaggagtggaacttggagttcaagtgtcagaagatttggttacagatgtttggtaaaattgtagtgccagaaaggtggggttggtgctttgaatgcttggtaaaaaaaattaggaagtcattaaaggatgttttaaaaataaggaggccgggcgtggtggctcacacttgtaatcccattactttgggaggctgaggcaggcacatcacctgaggtcaggagcgtgagaccatcatggtcaacatggtgaaaccctgcctctactaaaaaaaaatacaaagaactagccaggcgtggtggtatgcgcctgtaatcccagctattcaggaggctgaggcaggaggattgcatgaacccagaagctggaggttgcagtgagccgagattgtgccattgcactccagcctgggcaacaagagcaaaactcctcaaaaaaaaaaaaaaaatcagcccagtgtggtggtgcgcgcctgtaatctgagctactcaggaggctgaggcaggagaattgcttgaacctgggatgtgcaggttgcagtgagccaagattgcgccactgcactccagcctgggcgacagagtgagactccgtctcataaataaatacaaaaggaaaataggccaggtgccgtggctaacacctgtaatcccaagcactttgggaggccgaggcaggcggatcacctgaggtcaggagtttgagaccagcctggccaacatggtgaaactccgtctctactaaaaaatacgaaaaagtagccaggcgtggtggtgggcgcctgtaatcccagctactcaggaggctgaggcaggagaatcgcttaaacctgagaggtggagattgcagtgagctgagatcatgctgttgcactccagcctgggcaacagagcaagactccatctccaaagaaggaaggaaggaaggaaagaaggaagtgaaggagggaggaagagagggagggcagagagagagagaagaaaaataagggaatggtatggttaaacttatattttaaaaagcctttcatgagacagagaaaagatgggtctttatatttcttagctataacttatttctatagtattgttcttcattaagagcatatatgtgtatacatttatctgcacagtaacgtatcatttataagtgattagcaaggtaacgaattatctgagttgagtaaattctctaggtgactgaagaatagtcctttaactgttaataacttgatttttcctaaccattttggtggttattgctccaaaatgttgttcttatttttgccttgagtagcttggatataatttaatcgagtattttgggtaacccttatagatactctactaattgttttattattccagcaagaattaggctatttctccaccatacaaaaaaatgatcggctgattttttcactaattcaacaagcacttttttcacctccaactgtgctaagtatgcagagatacattggatcttacaatacagtagaagcacatatatgcataactgtaatacaagacaaattgttaagtgccattggagaggtatgcgtgaaatactgtggaatttcagagaaagaggaagacactttcagctagactaggaactcccaaggcttttggaattagcatttgaatggaccctgatgtatagctaactgaaatggaaatgggggtcggggtggggaagagaaatgcctgaaagagggagcaaggtggaacaatgtgggaagtttataggaaatactaggaagtaggaggtaagggaattgagttggactggtaaagtgagtcagatagatgacatagaacgctagtctaagatgttggaattaactttgtagtggggaactatttgaatgcagaatttgtgtaatgcttttgaaattgctttttaaataaaggatttggcagagaggaggaaaaattgcagggtagatcattttaagagtcctgtaccaggtcagtgacattaagaatgtaaaggaggggtactagatgtatgggtaatattatggaaataaaataagcaggatatggtagattagagttaagagatgactcaagattttaaatctgagtgggaggaggatggttataccagtacagttaatcaatctgctaccatgctgtctggtagaagggcaggcttcattacttctctgtcatttactagcaacacttcaacatccagctatccactataacaaagtatcaccttaaaagcaggagatctacaaatttggaaaagagagctttatttcttaggaagcttgaagcctgcaggcttggaagtgtatcctcagacagagaccaaaagcaagcccttcaaaggaggaagggtgagacaggaagttatgttgaatgggttggctaagtatacatattcaacagattataggaggagctatgaatattcatgagggggtgcacacaagcttagtgtgcacactccatgttacatacatcccatgttcactttgagttggagacctaacatttaatcatagtaaaattaaggtttacatgtcaaaaggtgaaacagagttcataggcatcctatgtgcagccttcatggaccagctagaaccagttggtgatctcttatcagtaaggaatgctggtcagttcaaaaccacaaaaacagagtggagtctggcttctgagttaggcaattggttgatatcagtggggagcaagtcttttgaaagggttggtttctttttaactcttaggaaggaaagttttatggtggttagtgagggaggggacctaacgagacttgctttacctcctgtcccatcatggctgggaactcaatttttaaggtttctctggggtcaccttggcaaagaggagggtgtccattcagtctgctgtagaacttagaattttatttttatttctcaaaagcaaataaccacacttgttgaatcagtaagtttgtttttaggagaatatagcctaagagttacaccattgtagcataaaatacttaaattttatgatgcttgttttttgctgctcattggtttcataaggaaggtgatctattttgactgacatcttgtttttcatgcaagtcttatctagtttcctagcattactattggtttaattatttactaagtttctgggttttgcttttttttttttaatatatgtttgggaatcttaaatatatctaattatatcttcagttataatgtttgtgtttgctatgatttttattctctaagccttaaataatgagattcagaaaatatcattaggtatagagtttattcaagcccaaagcttgaggatggccacctgggagcataggttcaagttgccctggcatatacactgtgattagcagcagttacaagtgtatttttaagaaaaaaagcggtttctatgtttatttaccaagaatttacattaagataacgtaagctatcgattggctatacattgttctttgtatcacagatttcaggaacataaaaataatcgggtgaggcatcaggtcaggaacataatgaatgcctagtttaaacaattgccctccccgcagtgggggcatgagagtcaagtgactgaagtcccctactccagtctttctgggcctggtaaatcttgcatactgtgcatagctgactgctgagctgctttccttctctctaacatgaatttcttgaatgcggtttgtaatctggattaagatagaattagcccttataatataacaaggcatgtggttggccagagctaaattttaggtaatgttttaattgactttacggaaataataaaataacactcagactttctctattggaggttagggcaaaaggatggcttattggtaggtagttcctcacttactgcagaagtagaaaaaagtagaaaagtagaatttacttttttttttggtatgcctagggtttgaagaatgaggttaattcttgttatccaaggtttatgtatttaattgtagcttagctggaagttggctaaaacagaaaatatctgatcaataccatgtttggttatagtttgaattttggctggaattacacgtgtaaggctcttgagaactataaaaagccaaatcagatccattgcgaccatggatttgtgccatttagatttactaatatattgttgtgagtcctatctaatttaaggtaaatatgattgtattgaaaataatttaaaggaaattttaaagttaggtggttttcttagctaattttatgatcaagaacaatttaattattgttactacatctgaaatgatatatcagaaatacggagattttagagggcagggactgtgattattttgtttgtaattctcaacaaaagtgacttaaagcagattgtcattatgtactttaatgtttattctaatttcagatgtgtcttacaaaagtggttgatgttgatggctaatgcctattttgcttaataaaacggcatacaagtccaacttacttgaaaagaaatttttaaatgttattttcttacctgttaccacaaagaagtaatacgtttgctatcctatcaactcagctgaccagtaagccacttgtagttgtgatattgttagcttttttagctttgggtaagctgataaaactagcctgcctctaattcctgtttataaaaatgtgtgatgaagtatcatatttatgtccagcttttccctttatttacatagagaatacttgctcaaaataccctttagtaatcatcccctctactttgaaatagtggagtcttctacaaattgtactttttctttaactgaatccattcaagtttaaataaaaggctacttccatttcctttaactctttctctgaactataaggctgttgactatacttaatttaacttcctactttgtaggacaaactcaagcaaccagtccttgtggactaataattgtaaaaccacaaacctaattcttaaagcaaaggaaatctgctttccaggtattttgcatttcatcctcttccaggtaaattattaaaacaagcaggaactagttaactttgccactgattgctgtgtgattgagttacttatctttttttcagtcattgggagtggaaactctaaaaattagtgaaagttatttagggtactaaaaaattacccaattttagagtgaaaatatcaagggaaaatgttgatgaaaataaatacttttgaggtgaccaaatgtgtatctttatacttcatgcctgactgtaagggaaacattgctttttataatgtaaactactcatcttgggaataatgaagtggtatagctaggagcaaagaactgatgttgataggagtaggggagtccttttcaattttaatactgtgtagagtggggatttaacaatttttctcagcctttttttttccttttttgaatgggccgagagattgaggggtggaactgaatgcagcctttctcatttatgatagtagatactcaggtcccagggctgctatttgcaaagtccaatgcaaaatgagttatgtggtagacctcgttcaaaaattaatagtttcaaggctgcaacagtagagcattaaactgagtgtggggctctccctatgtgactgtgtaagttggacacccatgaagctggtctcctaggcactttgtacagaaagaaagataaaagctgaataaatgaaactttggcttctcagcaattggctttctctaccccattcctgttttacacaagctagcatgtttttgttgttgttgttgttttctaaaaaaaggccctgattctttttcatttgaggccaaaggaaagaaaattatatttgcagtctttttatatgcttggggcttatgaaccttgaaggattagtgacaacagttataattgaatttattactaacacaggaacagaaaaccaatactgaatgttttcacttataagtaggggctaaacaacgagaacacatggacacaaagaagggagcaacagactggggcctaccttaagggtggagggtaggaggagggagataataaaaaaaactacctatcaggtactgtgcttattgcctgggtgatgaaatagtctgtacaccaactcccgtgacaatttacctatataacaaacctgcacgtgtacccctgaagttaaaataaaggtttaaaaaaaagagttgagtttatttttcttacacttgtgtatcctttggcatgtgtgcatcctcttcccacctcaccactgccagcacgacctccagcaccaactttttaatagtgatagaatgatgatttacctgttcgtgtcatgtttattcctactgtagttctgaatgagctcatagctaatattgtccaccaaacttaacacaggccaaccacttagagaagaaattttcttccctctcgtaggggtatactgtgcctcttactttgggtatagataccccagttgtttcactttgtcctagagataccagcaaccaattagaaaagaaatggattaaacaagacttttaagttattgggcaggtgagaatgattacaaataaaaatacttaggtggcgaatgttaatttagttatggtgtgctttatcaaagaagttccagatgtttttatgaaatctcattctcttgggtcatttatatcgtgaaggaaaaagaaaatgaaactcattgaagcaattattgtataaaatgggcagaaaggtggaaagagcaaaagattttaatgtcaaagtcaaaagtaaattcttaatcttctttgtataaaactaaataatggctcagaaaacagacttgaatttttatgtgttgtgttatctatttatttgctttgcaccaatctggtttagtgctttggcatgttgttgtcgtcatggtcattggtcgtcgtattcatagcatagcagtgtggtgttctttttgaggactcatgagtttattgtatttctctttcatatttgtatttgaccaagacaaatatcttactgaaaggtatattctattttttttttttgcatttgaccttacagctcaatttattctccgtatgagtaaaatattctcagtagcaatttagatcttttataaatcaggtaacttgaaagataacagtcttttggttgaaattgatcacttaaacagtttctgcccaccgaatagtaatcttaggaaggtttggatgactggatttgtttctttctatagaagcttatgcttgagaagaaaattaatactttctaaaaataattttttaatatatttaaagtatagaaacaatgttagatttaaaatactttgtaaagagaaaagagtgtgtgggttttttgtttttaagttccttggagttttttggtcactaacaagtgcaaataaaatcctattacaaaaaaaggctttgtgtaacagttatctatttggcagattattcatataaacaactctgttaaagctttggctgtttatcacagatactgatgagctgcattatattaaaactgaatgtgttagtgatctgtatttaatgttctagtggctcctggtacagtccagaacaaaactacttttccctctagatataataaaatctcttaagtgagaatattggtataacagacatgtttctacctcatccttttcatttattgaaattttctgtgtaaatcatccttttatgtagaggatcctatatagatgtcccctttttgtgcagttttaatatgttaaatactcaattttaaacagattttcccaaaggtatgggcagtatcacaggagtgggtttggatattggcattagaaaaactattgtaaaatatgttcatgtttcacctgctcaaaaatataacatttcaggagataataaatctagaattgatgaagatattaaaacactgaggcatttagatttcaatttccaaagttcccagatttttaatattttaactttgtgaataagtttctagggattctcagtgcatgagattctgtaaccttaactttggagccctgggttctagagatgattgatcagtcataagctggcagagttgtcctgctttccaaggttataataccttcaaatactcattgctacaaaaatgatggcattctcatttcaagtttagatctgatcattcataaaacagcctaaacttaagagtttccacagtccataaagcatcaaaagccataaaataattcttttttccctattaaagaaaaagccaaaaatatttctgtattttagaataaacatttccagttccatttttaaaatattaacaacatgtaaatttaaatgcttttgtaactgataaaatgttcttttgcatatttccctaccatcctcctgcccttcttcctcaatttgctttacacccctaacattaacattctgtgaacaaatttttaagggttgttataatgtattctatttgtatcctacagtaatttatttgcattttaaaaggagtttgaatacagtgtggcaattttgacaaccagcaagctcatcaaagtaagattctacctgtaatcttatgatacaccaaatgcctgctctattctgcctaacacagacaaggatccatctttacagatggaaagaatagctgacatctagtagcacttactctttgagttccctgaactctatttctagtgtatgaatcactcataacccacttaaattcagattgctcaccaaagcgattaggaaaaaggtttttcctactgggtacaaagcataaggtatttcactcttgtagttgttgtgaataacctagtttctgtacataagctggctggtcagtgatttatatctaggataatgaagtatgtgtgactgcagcaacatatttaaacaaatgatgcacaatgttgtacaggaatattacctgtattaaataggagtaaaacattttcattcataggctgtctaaatatcaatggttaaattactgagttttgctttatttttactccagaagtatttgttgagttcctactacatgcgaggctcttgactgagataactaataagatccttataagatttttctattccagagtttggttgtttagctttgaattacccattctttaatacctaacttgacttctagtagttctttacttattagactcttcttctaaggataaacagaaaaagactgtgtcctagattttacttttgaataggcaggtgacaggaagctgaaaccagtggcttcaatgagatttaggtttcttgtggttttgaattttctatatgacatttctgttatcattgccatttgactaaggaactatgtttactggttttgtaatagtagcatctattcttttggaatctggactttgaacaattcgtttcacagagtcattgaacagccagttccttctctcttacttagaatttttccagggaatttttcacatggcaggataatggaagaaaagccatttgggtaactcttctgttacatttgtatccctccccccttggatccctacagataaattcttaccttctcttcctgctaattgaccagcagcaccctggattgctatcatccctttgtccaaagaaatggtgtagctgtattcaaagacctataaaatgttatgtgctatctattgctacctataaaaaatacctttttttctttttaaaatcaggttgttttagaataaataaaggaaaagtcaattaatggaaaaatttcaagaacagttcacataaaattttggtctattttaatttttttttttaccttttcaaatcacattttaaaataagcagttggagaaaatgtaaaatgaaaaatatgtaaagaatagttagcattaaacatcagatccaattgtaaacttacgtgagataatatggatttatatttattttctagtaaaataaaacttatatgattgcataattgattattgtatatgcaatacaaattaagttcaaaaatgaaagttgagctttttttgtcctttcaaatgtagggccagcatacaattttaagagctatttattataaaattcatggtgaatcactatgaaaattgatttttccttgagcttttaattacattatccatattcccttacgaagttttccaagtatagaagacctacttaatggagcagtaatcaaatgcaaacttaatttaatgatctcaaataaaaggttctacttttctggaaataagattaaaccagatattaaaattatgtatgattataaaagtaaagattaccattattgtaataattgaccaatttagtactttcaagttatttagttacattttctcagttctagtttggtgtggtaaagcattatttgaaaaggcagtataggaagaatacagatagtattcttcagtacagataataccgctgtacagtacagataatattactgctattacagaatcagcaagttgaatgcatgcttcagggaatagggaaatgaatgcggactttttctaactgatttagatggtctgtctgacctctctagaaaaatatgtgtgtatgtatattttgaaatatataaggaatgttaagtctttctcttcccctttttagccttagattgtaagcaaaagaaatcaaggtcaagatctggaagcaagaagaaaatgctaacattacctcatggtgctgacgaggtttacattctccgatgcaggtatatgcctatattgccaaatctgatcagtttcttcatactttgctttgaaacatattagctatttcatttgggatttttaatttgtggcagagtgcattctcaacaatcaagttataaatgaacttttggagataggcttaaaatcttaattcagctcacaatatccgtacttcaacaactaatgaatcaagttttttacattagccaatagtaatgtaaatctattatactgtgatttattaaagtagcttggccaggtgtggtggctcatgcctgtaattccagcactttgggtggccaagatgggtggatcacttgaggccaggagttcaagagcagcctggccaacatgatgaaacctcgtgtctactaaaaataccaaaattagccaggctttgtagcgggtgcctgtaatcccagctacttgggaggctgaggcaggagaattgcttgagcccaggaggcagaggttgcagtgggccgagatcgtgccactgcactccagcctgagcgacagagcaagactctgtctcagaaaaaagaaaaaaaaaactggctttccttgtgtttatttggtttgtatggtttaattttgtttggtttgatgttttgttgtcttgagttctcgcttattgggaacacattttctctcccctcatagtcacgccttcttccgtactcacactcacacacaacacacatgaagaaacatagacacaatgccatttaaggaatgctaaactggggaagggtcttttctaaagaatgacatattttggagtaatagttgttgtttcaagtgaattaagatgtgtagatgttaattttaaaataataatgctcccacctatacaaagattactggagtttattatagctgttaataaacatatgaattgggagttttgatgttttattaaatcatttgactttagaaactttatcaattgctgtctttaaaatatgataaagtttattccttatgttttaggattttgtgtgaattagttttaaagaaagagaattggtcatgttaagagaattgttatctttctgtaggttttgtggcctagtctttcgaggacccttgtctgttcaggaagactggattaagcacttacaacgacatattgtaaacgctaatcttccacggactggagctggcatggtggaagtcacgtcactacttaaaaagcctgcctccattacagaaacttcattttctctactaatggccgaagcagcttcatagaaccaggaaaccttttaaatagccagtttgaattggatgtaaatttgaaattctttttttttaagccacattaaattatctgtttataaatactaaagcaggaaaatggggggaaagtgaattacagtgacatcagagcaaattgaatacttaaaacagtaagtagtctatatattttatatagggtggaagatgtgtttttaaggtttatgaagttttgttggttaactgtgttcactcagtaaaagagcagtacatgtaagcagccattaataaactgttgcacatggatacttatagacagacttattggacaattatgttttttgcagtgttaccagaatcaaggctctgtttattccccacaagacttgcatagaaaaataagatattatattttgtttgtatgtatttagtgttttgtataataccaagaaccgctgactaaatttactcaaattagggcattaaatatcatgtacttcatagtttgagactgttcactcaaatagggcagagtactattctatctagatgtgtaagtgttttttttaaaatcacatggaacggttttttttatactaaaaagtggagggagatttgtttaaacaagtatttctaaaagaaatatgtacatagttctggaaattatttgtggtaaggaaatattctttactccagttgcatttctcagacaataaagtggtgcatccatgctacctcctactttgtcaacaaagatgctatttaccctttacatttttgtatcataatagattttaaaaatctaatgttctttattgcaagacattcttttgttaacaggtttgtttctttttaatgttttacctaaaatttgacatgcttacaggacaggtttgcctcttactttatttaacattgtagaaatgtaattaataaacaatgctcactacacagtttagaatagacgttctcatttatattatcttccaaatttgatcagttagcaaaacttaatacaccaattaaaatatttctacatatgagaatgtttacaatttaaattttagaacttgttttggatgtgattatatgtacgaaaatcgtgtaacactatgctcatgctaagaaccgacataacagaattactgaaataaatgtgctgtgaggaatggaaaatatggtgcaggtgtcttggtcatgataaattgtgattctttttaaaaattttttccaaaaacaattaggtattttaatctgaaatcagattcctttacaaacaacaagtttttgtatgcaagcaccattttatttcatgtagtatggctaatactatagttgaaccaaggatatgcattgattctttgcttcgtatgtaaataaagttaaaaacagttaaaataaggagtattttggtagagtatatacatacctcactgccagtgaaattgctttcctatggtatatctccttaccagaaaaatctctaaataaaaaaaggtttaaagaaaattaaaatgtgaaa

SEQ ID NO: 1964 - DNA, 344 bp, Homo sapiens
gatatgcaagcttctaatgctaaattagggctttaaaaaattccagtctgggccaggcgcagtggctcacgcctgtaatcccagcactttgggaggccgaggcgggcggatcgcgaagtcgggagatcgagaccatcctggctaacacagtgaaaccccgtctctactaaaaatacaaaaaaattagcaggcgttgctgcgtgcgcctctagtcccagctgctggggaggctgaggcaggagaatggcatgaacctgggaggtggagcttgcagtgagccaagatggtgccactgcactacagcctgggtgacagagcaagactccgtctcaaaaaaaaaaaaa

SEQ ID NO: 1965 - DNA, 174 bp, Homo sapiens
cacgccattctcctgcctcagcctctcgagtagctgggactacaggcacccaccaccacgcctggctaattttttttatttttagtagagacggggtatcaccatgttagccaggatggtgtcaatctcctgatcttgtaatccacccgcctcggcctcccaaagtgctgggat

SEQ ID NO: 1966 - DNA, 122 bp, Homo sapiens
attctcctgcctcagcctctcgagtagctgggactacaggcacccaccaccacgcctggctaattttttttatttttagtagagacggggtatcaccatgttagccaggatggtgtcaatct

SEQ ID NO: 1967 - DNA, 191 bp, Homo sapiens
attctcctgcctcagcctctcgagtagctgggactacaggcacccaccaccacgcctggctaattttttttatttttagtagagacggggtatcaccatgttagccaggatggtgtcaatctcctgaccttgtaatccacccgcctcggcctcccaaagtgctgggattacaggagtgagccaccgcgccc

SEQ ID NO: 1968 - DNA, 344 bp, Homo sapiens; identical to SEQ ID NO: 1964

SEQ ID NO: 1969 - DNA, 723 bp, Homo sapiens
tgccttccctgagggaagaggcccttgagtcacagacccacagacgtcagggccagggagagacctagggggtcccctggcctggatccccatggtatgcttgaatctgctccctgaacttcctgccagtgcctccccgtaccccaaaacaatgtcaccatggttaccacctacccagaagactgttccctcctcccaagacccttgtctgcagtggtgctcctgcaggctgcccgttaagatggtggcggcacacgctccctcccgcagcaccacgccagctggtgcggcccccactctctgtcttccttcaacttcagacaaaggatttctcaacctttggtcagttaacttgaaaactcttgattttcagtgcaaatgacttttaaaagacactatattggagtctctttctcagacttcctcagcgcaggatgtaaatagcactaacgatcgactggaacaaagtgaccgctgtgtaaaactactgccttgccactcactgttgtatacatttcttatttacgattttcatttgttatatatatatataaatatactgtatatatatgcaacattttatatttttcatggatatgtttttatcatttcaaaaaatgtgtatttcacatttcttggactttttttagctgttattcagtgatgcattttgtatactcacgtggtatttagtaataaaaatctatctatgtattacgtcac

SEQ ID NO: 1970 - DNA, 723 bp, Homo sapiens; identical to SEQ ID NO: 1969

SEQ ID NO: 1971 - DNA, 4509 bp, Homo sapiens
gatctctgagaagtatgggttccctgaagagaacatttacaaagtctacaagaaatgcaagcgagggtgagtgcctagttcaccctcccccagctggttgctcagtgctgagcaatgtttgtacttggcctttgtggaggggctgaggggatgtggagttggggtggagagctccccagccaggccaaagccactggtcacctctccatctgcagagaccagacatgggtcacaactgggaaggatgggagtgggagacaagtggaagggttgttacatatatgacctcctgggtggggtggagggagaagtggagggtcatgtgtcagaagacccaggttcaaggccactgggaaaccaagccatttgattataaagataatgattatagtgaccaccatccccttgagcactcactatgtgtcagacacgaggctaagcacacactacttaactctcacaaccatactaagaggtaaataccatagtcctcatttgacagataaggaaactgaggctcagaggtaataagcagtgttcaggggcaggagaagtggatcaaaggcatgaggcaggcaggcccaacaaagttgttactgacagagccgtaggcaggaagggagtggctggcgatgagtctggaaaaggagttgtgattgggagtcattttgagggaatccagccagggatgctccacaggcctcctccatctttgctagacagactaggccaggaataaagctgtaccctccagggggcaggcagtgcctggctgcctaccatgggctcctgggcaccagagtacctttgttgtctgctcagaagatcccttgggaaagggaggtagggtcacatggtaactgtcctccagacatcagtcccctggtcagagctagtgagcctgtcctctgcagcccttcctgagtaggtgacttcaccagcctggcatagggcccccagacagtgaggaattgtcattgctgttgccagcccagaggccccagaaccagagccctgggaaatgcactcctagcccctctgcccacagctccaatctgatcctcttgctgtggatagtctaactcgagcgacatttgctagtagccccttggaggtgctcagccacttgccccgtggctactgcaagtggatcttcctttgtagaagactttgcaaagcgaggcaagttttgtactcaagctgaatccccatctcatcaggcctaggggcctggccgccttcctcacaggcccagccctgcctgccttcctcctccttggttccttcctagccttccatagaaggctgagggtgggggaaggtgtccatccctgcagcccctgggaagggggttttttttggttttagctgcatgcatgtctagagtttttcgtgtgtcttttttttccaagtttcggtttccatctgagtctcacatgctctgtagagtgaaatccacttcacggcaaagggcaggctctgctttccccagacaagcccagccccactctcccttcagctccagtgcccatgccccctggctccagccccacctgtggcaggcctcccttaccaatcccactccaggccaggctgtgtgattgcatgggggggtgggagggtggggtgtgtgtacaaggatgttccccagccccactggctgagttgccagaggcttccccttaagccccagccagctattgaaatcataattctaaaaccttccatttatggggcacttcctacatgccaggcactgggctgcatcactcccaagcatcatctcgttgaccctttgagctgggtatcattatctctgtttgtacgtatggggaaactgaggtctgcagtagttacaaggtcatgagttaggaactggcagaagcatcttggacttctaaagcctgtacaggcatccactctgttatcctgcctcctgcttgttcctctaatcactacgcaatgtgcaaataaaggatgcagccaggctggccagtttatttgcccagcaccatagccagggcatcactcagcagcccttcacaggcaccccacacacccccacggccgtgaaaacatcagccccaggactgtctgaaatgtctgaatgacagtgttccccaaaatagatcttaggagaggagaggccaggctcatcttctgcctccctctgagtcctcatgtgagaaacaggaaattctgatcaaaggcctggtttattttcataaaaccctcccgaaagtcctctggatgaaggtggatagagtcagctttacaggccccactaagtgctgcaaagatgagcaaatacattgtttttgctggcagctggccaggggtttaatgtgactcaggactgaagacagctagaaggtggcaagtaacaagaggcccacatttggtgacagtggtactgcctctcaggggcccgctgtcattaacttttgagaagaggggtctgtgggcccatctggaagccctcttgtgcaggtgtgagcaggtgtgagcttggcagatgtgagcaggtgtgagctcagggcgctggaaggccctgctagggagtgggacggatccagccttccagctggtacatatcagttacttcacagtgcctggcacctagaagcacgcaatcaatggcagacaaaacaaccctgattttgaaaaaggacccacccctctgcccagttctggtctcccctggtctgtttccgacctcccgtgcccaaagagccctctgtgaaatgaaggaactccaggcaggacccaagaaaggggagcctatgattacacattggcagtcagcgctcaaaccactgacagcccaagcctggaccttcttcctgagagcggcagggagagacaactggatgtgggccatgccttcgggtccatgttgtctccattgccctcggggggtcctcgtgcctgccgctcctgcgccacttcaaagaactctcccatagccctggattttgccttccttctatctgctgcttcttaacttgtatttatagggctttgtttccttctaaaaatgatacagtagaaagagaaaaggttcaaatcccagccctgccatctatgaactgtgtgaccttagacaaataactttgtttctttgaacctcagcttccccatttatgaactggggtaatatgaggattcatcctcccagtccctactagattcaaaactcctggaaggcaggaactaggtctaattcatctccatatggtccttgtttttgagcaaagccctgcacatggaaaggcctcagtgaatataggggatgaatgggaagatgacggcaggtgggcaggtggatggaggatggtggatgggtgggggtgtgggtagatggtgcatgagtgggtagatggacgagtagatgccaggtaggtgtgtgtgtgggtgtgtagtagagggtagatgggggtgtgtatgggtgggtagatggtggatgggggtgtggttgggtgggtggatgatggatggggagtgtgtgtatgtgaatgaatggtggatggtgaatgtgtgggtggatatacccaactccattacatgctcagaagacagcagggaaggggcaaggagaaggttgatgtgatcagctcaagtcacatcttggtgggtccttcatcaggagcagcttctagagggctgctctttctttggcataaacaatggctctgactccctgcaggggcccacagccatgaagattccgtctctctcaggttgacccaggtccttgcctggagaatatggggagagagtgggcctagcccctcaagtctatcggacaatcctcctgagatttcagcttcctgggaatggaactgggaggggcttgtgtggcacctgcctctggctcaggcatgcctgagggacacatcctagcctcttgttgaacccaacccaccacccctccggggcttgaactcacacttcatgtccgagtcctcaatatggtgactaagggagcactgcgtctcccccagatctacatactagttgcttgagtgtccatcctcgggtgtaccaggagagaggcaatccggcgcagtagctgtgagtgtgggggccagcaggcctgggttgggttgtggctcggccactgggcattgtgcagtaaaggagactgtgactccctcacctcgtggggttgttgtgaggatcagagggaaggtttgtgaggtgcctaaaatgtggcaggtacccactgggtatgacccatcactcatcctggtcactcagaaggcctgaaaacagggcgcctgctgtgttccaaccacatcccctcttccattccagaatcttagtcaacatggacaacaacatcattcagcattacagcaaccacgtcgccttcctgctggacatgggggagctggacggcaaaattcagatcatccttaaggagctgtaaggcctctcgagcatccaaaccctcacgacctgcaaggggccagcagggacgtggccccacgccacacacaacctctc

SEQ ID NO: 1972 - DNA, 457 bp, Homo sapiens
gaggagaggccaggctcatcttctgcctccctctgagtcctcatgtgagaaacaggaaattctgatcaaaggcctggtttattttcataaaaccctcccgaaagtcctctggatgaaggtggatagagtcagctttacaggccccactaagtgctgcaaagatgagcaaatacattgtttttgctggcagctggccaggggtttaatgtgactcaggactgaagacagctagaaggtggcaagtaacaagaggcccacatttggtgacagtggtactgcctctcaggggcccgctgtcattaacttttgagaagaggggtctgtgggcccatctggaagccctcttgtgcaggtgtgagcaggtgtgagcttggcagatgtgagcaggtgtgagctcagggcgctggaaggccctgctagggagtgggacggatccagccttccagctggtacatat

SEQ ID NO: 1973 - DNA, 102 bp, Homo sapiens
agtaaagatggggtttcaccgtgttagccaggatggtctcgatctcctgacatcatgatccacccacctcggcctcccaaagtgctgggattacaggcgtga

SEQ ID NO: 1974 - DNA, 562 bp, Homo sapiens
cagtgggaggaagagttttctgagattagtgtcaaatggctcttataggaggtcagaaggtctttacccctggcagtttagggaaacttggcatggagcttgtgcaagggattcatgcatcaaggaggggtgggattgggctagagggcttggctggcctcttccattcccagaattctctgattctgggttccaggagcgcctgtgctcttttttctaaagaaagactacctagaggaatacgccacactgtatagcaactttatgtgattgctgaggcctccccagccacctgtgatctgtgaactggcctcttgttcttgcatcttttaaataagttaatgtccatgctcttaattttggttttggatgagttattatttctagatacttaaagcaattaggccttatagtgccagtattggttaagaatagtacatcaccaaggcaggagaatcacttaaggccaggagtttgaggctgcagtgagctatgctcatgccaccatactccagcctgggtgacagagtgagaccctgtctctcaaaaaaaaaaaaaaaaa

SEQ ID NO: 1975 - DNA, 562 bp, Homo sapiens; identical to SEQ ID NO: 1974

SEQ ID NO: 1976 - DNA, 3370 bp, Homo sapiens
ctggacggctgccgctgactgtaacatgtaaagcaggcactgagcaccacctgcctggcagtccagggcatggagaggtaaggccccattgacatagagaatagggtgagatgggcagggctctcaacccctggatgcaaaactgtgattcagtaagcaaatatagcctagaactgggtccattctattcctggcctggtacatggggctgaaggcacagacagcaccctgcttgtgacttcactggcccaactcatcctggaccccttgagcaagaccatggctggattccaggaactggtggagtggaagtggatccaggaaagtaagtgaccacccaaccccagccttaccctccatccagaaacttgcttcctcgtgcccattgctctgccccctccccaggccagccaccccttccagctgcgctgtgcccattcagccttctcccatgcccaccccaagcatgaggcacccacctttctcctcttcctggactgcgtgtggcagctgggctgccggttcccactgtcattggagtttggggaagggctactgttggcgctgtttgggcacgcctatgcctcctcttttggcaccttcctctgcaacagcgaaaaggagaggtgagctgagggggtgttgaggtagcttaggggcaggcacaggaaagggttggatacctgtgccatcagtgccttacttcctttttttttttttttttgagatgaagtctcgctctgtcacctgtcgcctggtctggagcgcagtggcacgatctgggctcactgcaacctttgcctccctggttcaagctattctccagcctcagcctcccgagtagctgggattacaggaatgtgccaccacgtccggctaatttttatacttttagtatagatggagtttcaccatattggccagtctgatctcaaactcctgacctcaggtgatctgcccacctcggcctcctaaagtgctgggattacaagcgtgagtcactccgcccagccagcaccttacttccttaggagccatctttcccgaattcaagtgggtttgtcttttaggaaaactgagtgttctccttgccccacctccaaatctcatacttcctcctaacttctgcaaacccagagataaataggtccaaggccaatcctttagacagacctactctgtccatagccaattgcaagtgaacccctaccttgaaaacaaggattaaaggggaaatttgctgcaaaaataatttataaggctctctaccactttgcaaggtcgattgtttcaaagcaatagaacagaggttgaaagcagagtggaatcatttgggctcaaattccagtttcaccactcacctgctgggtgttcatagcaaacccgtctgagtctcaatctcatcggtagcatgaaggggataagagcagccataatctggccgggcgcggtggctcacgcctgtaatcccagcactttgggagctgaggcaggcaggtcacctgagatcaggagtttgagaccagcctggccaacatggtaaaaccccatctctactaaaaatacaaaaaattaggcctggcacggtggctcacacctgtaatcccagcactttgggaggctgaggtgggcagatcacaaggtcaggagatcgagaccaccctggctaacatggtgaaaccccctgcctactaaaaatacaaaaaattagccgggcatgttggcacccgcctgtagtcccagctactcaggtggctgaggcaggagaatcacttgaacctgggagtcagaggttgcagtaagccaagatcccaccactgcactccagcctaggtgtcagagcaagactccatctcaaaaaaatataattagccgggcgtgttggcacatgcctgtaatcccagccacttgggaagctaaggcatgagaattgcttgcacctgggaagcagaggttgcagtgagccgagatcatgccattgcattccagcctaggcaacagggtgggactccattaaataaataaataaataaataagtaaataaaagaagtggtatttttattatttggttggcttgttgcatatgctgcctatcagtcccagatgccagctgtcttatgagattgagagatgcggggagggagggttcacctttccagggtgaagatcagatttagttatcttctgttgctcagtcttcctctataccccatcctgcttcactaaccccactagtcctggatcatctctatttacctccctctcccccatccttcatctttagtctttctcctaaaattgtctgagtttggtcctcccttgccagaaggccctccccccgtcttcatccacactggtctcttccatctggactctccggcagccgcctcactgttctctgcatcttcattgttatcaattttctttcaaaagctcctgggtccagacctatcaatattcacagtgggccctttcccgccttctttctttggctcatgccgttctccccatgttggctgttgctttgcacagtgggtatgctaggtctgttgagactcagctcaaacatcacattcttaattagccttctctgacattgaggcaaaactaaattggtttctccctttaaatagaactccttaagaagtaggactttgtcttgttccccttttattctagtgcctagtacaagatctgactagcaataatgtttgcaagaaaaaggagaaaagtaaaggttatcactgctccaaagtggctgtcaccctactaaccagggctgcccacccagactcccagagggcatacctggggctggaaactcactccctgcctttctgcagatgccgtgtgaagggaggactcagatgcactccctgtggtctgggctcaaccagccaaaagagcaacaaagactccagaacccactctacctcctcaatcccttggccatctgtggagccccagagcctgcggctgtggcaaggtgagctccacaccttctcccctgggtattacccctctgctcagcgtcctgacctgtctttcctcctcctcaggcctgtttctgcgctggacctgctcacctgagcctgcagaagctgcatgggggaagagtgtggcaaatagtgacaggaagggagaagacagaagcctctcagccaactgcttcagccgagcccctattctaagcactggctccttggatagcagctgagatgttcctgaaacctctgcaggccccttaggacctttacaccttggatgagggtgcctgcaacccaggttagccaaaagtactgagggtcttaagtttgaagtgtccaaagtatagggaggtctcaataataagagtctccatgatcagca

SEQ ID NO: 1977 - DNA, 3370 bp, Homo sapiens
ctggacggctgccgctgactgtaacatgtaaagcaggcactgagcaccacctgcctggcagtccagggcatggagaggtaaggccccattgacatagagaatagggtgagatgggcagggctctcaacccctggatgcaaaactgtgattcagtaagcaaatatagcctagaactgggtccattctattcctggcctggtacatggggctgaaggcacagacagcaccctgcttgtgacttcactggcccaactcatcctggaccccttgagcaagaccatggctggattccaggaactggtggagtggaagtggatccaggaaagtaagtgaccacccaaccccagccttaccctccatccagaaacttgcttcctcgtgcccattgctctgccccctccccaggccagccaccccttccagctgcgctgtgcccattcagccttctcccatgcccaccccaagcatgaggcacccacctttctcctcttcctggactgcgtgtggcagctgggctgccggttcccactgtcattggagtttggggaagggctactgttggcgctgtttgggcacgcctatgcctcctcttttggcaccttcctctgcaacagcgaaaaggagaggtgagctgagggggtgttgaggtagcttaggggcaggcacaggaaagggttggatacctgtgccatcagtgccttacttccttttttttttttttttttgagatgaagtctcgctctgtcacctgtcgcctggtctggagcgcagtggcacgatctgggctcactgcaacctttgcctccctggttcaagctattctccagcctcagcctcccgagtagctgggattacaggaatgtgccaccacgtccggctaatttttatacttttagtatagatggagtttcaccatattggccagtctgatctcaaactcctgacctcaggtgatctgcccacctcggcctcctaaagtgctgggattacaagcgtgagtcactccgcccagccagcaccttacttccttaggagccatctttcccgaattcaagtgggtttgtcttttaggaaaactgagtgttctccttgccccacctccaaatctcatacttcctcctaacttctgcaaacccagagataaataggtccaaggccaatcctttagacagacctactctgtccatagccaattgcaagtgaacccctaccttgaaaacaaggattaaaggggaaatttgctgcaaaaataatttataaggctctctaccactttgcaaggtcgattgtttcaaagcaatagaacagaggttgaaagcagagtggaatcatttgggctcaaattccagtttcaccactcacctgctgggtgttcatagcaaacccgtctgagtctcaatctcgtcggtagcatgaaggggataagagcagccataatctggccgggcgcggtggctcacgcctgtaatcccagcactttgggagctgaggcaggcaggtcacctgagatcaggagtttgagaccagcctggccaacatggtaaaaccccatctctactaaaaatacaaaaaattaggcctggcacggtggctcacacctgtaatcccagcactttgggaggctgaggtgggcagatcacaaggtcaggagatcgagaccaccctggctaacatggtgaaaccccctgcctactaaaaatacaaaaaattagccgggcatgttggcacccgcctgtagtcccagctactcaggtggctgaggcaggagaatcacttgaacctgggagtcagaggttgcagtaagccaagatcccaccactgcactccagcctaggtgtcagagcaagactccatctcaaaaaaatataattagccgggcgtgttggcacatgcctgtaatcccagccacttgggaagctaaggcatgagaattgcttgcacctgggaagcagaggttgcagtgagccgagatcatgccattgcattccagcctaggcaacagggtgggactccattaaataaataaataaataaataagtaaataaaagaagtggtatttttattatttggttggcttgttgcatatgctgcctatcagtcccagatgccagctgtcttatgagattgagagatgcggggagggagggttcacctttccagggtgaagatcagatttagttatcttctgttgctcagtcttcctctataccccatcctgcttcactaaccccactagtcctggatcatctctatttacctccctctcccccatccttcatctttagtctttctcctaaaattgtctgagtttggtcctcccttgccagaaggccctccccccgtcttcatccacactggtctcttccatctggactctccggcagccgcctcactgttctctgcatcttcattgttatcaattttctttcaaaagctcctgggtccagacctatcaatattcacagtgggccctttcccgccttctttctttggctcatgccgttctccccatgttggctgttgctttgcacagtgggtatgctaggtctgttgagactcagctcaaacatcacattcttaattagccttctctgacattgaggcaaaactaaattggtttctccctttaaatagaactccttaagaagtaggactttgtcttgttccccttttattctagtgcctagtacaagatctgactagcaataatgtttgcaagaaaaaggagaaaagtaaaggttatcactgctccaaagtggctgtcaccctactaaccagggctgcccacccagactcccagagggcatacctggggctggaaactcactccctgcctttctgcagatgccgtgtgaagggaggactcagatgcactccctgtggtctgggctcaaccagccaaaagagcaacaaagactccagaacccactctacctcctcaatcccttggccatctgtggagccccagagcctgcggctgtggcaaggtgagctccacaccttctcccctgggtattacccctctgctcagcgtcctgacctgtcttcctcctcctcaggcctgtttctgcgctggacctgctcacctgagcctgcagaagctgcatgggggaagagtgtggcaaatagtgacaggaagggagaagacagaagcctctcagccaactgcttcagccgagcccctattctaagcactggctccttggatagcagctgagatgttcctgaaacctctgcaggccccttaggacctttacaccttggatgagggtgcctgcaacccaggttagccaaaagtactgagggtcttaagtttgaagtgtccaaagtatagggaggtctcaataataaaagtctccatgatcagca

SEQ ID NO: 1978 - DNA, 463 bp, Homo sapiens
agggaatgctatgttgctcccatcagactggtgtacatcaagggtgttgtgatacttccatcaaattggtggtttcccaggacattgtgtgtttccccagagggctatgtgacccttccccaggtactttctcaaagggtcttgagtctctcccatcagactgaggaatcctcaaagctaagaaaccattttaggctgggcgcggtggctcatgcctgtaatcccagcactttgggaggccgaggtgggcggatcacaaggtcaggagtccgagaccattctggccaacatggtgaaacctaacaatgcaaaaactagctgggtgtggtggcggtcgcctgtagtcccagctactctggaggctgaggcagaagaatcacttaaacccgggaggcggaggttgcagtgagctgagatcgcaccactgcactccagcctggagacagagcaagattccgtctca

SEQ ID NO: 1979 - DNA, 463 bp, Homo sapiens; identical to SEQ ID NO: 1978

SEQ ID NO: 1980 - DNA, 825 bp, Homo sapiens
aaatgatgaaacagacaccacaaaatatctgaccagaagccatttattaccaaaccaatttatttcttagagttcaaaaccttctgtgagaatcttctctggcctggttggagatccaccttcttcttttttttttttgagacggagttttgctcttgtggctcaggatggagtgcaatgacgtgatctcagctcactgcaacctctgcctcctgggttcaagtgattctcctgcctcagcctcctgagtagctgggactataggcgtgtgccaccatgcctggctaatttttgtatttttagtagagacgaggtttctccatgttggtcaggctggtcttaaactcctgacctcaggtgatccgcctgccttaaaaaaaaagtggtgggattacaggcatgagccaccacgcccggcaggagatccagcttcttaagcctcaaactcaaattcgaagtactgtgggtcgaagtaatggatacggacgtaaccatcttcgccgccgctgctgtagctggaaaaagatagccaggcaccagtcaggtgcttactctgggaaaggcagagacccaacccaggcttaggtcagctgcttcactggtaccctacctcttgccatcaggatggaaggcaacactgttgataggtccaaagtgacccttgactcttccaaactcttcttcaaaggccaaatggaagaacctggaggaaaagggacacaattaattcactttctatcttcttccaaaacactttggaggtggcactccccaaatgcaaattgttattattatttatttattttgagatggagtcttactctg

SEQ ID NO: 1981 - DNA, 15173 bp, Homo sapiens
attaaacaaactgtaattttttaaagctacaccttttaaacatgattggctatttgaacactaactagatatttgatgatattgaggaattattgtgaatttttagtgtagtaatgatattgtggtttgtataaatatatttagggataatatgatgcctcagatttgctttaaaataacacaggatgaggataagtggtaggactgcaagggaaacaagactggccatgagctgataactgttgaaggtgggtactgggtatataagggctcaccacaccattctcttgatttgtgtctatttcccataataaaaagtttaaagagagagaaccgatgaaggggagggagagagtcaagcacacaataagagtgacaaacagtgccaaatcagcccacagtattaagttttcacatatttacataaatatcacctggaatgcaatattgaaattaatgtatatcactagaataaaaaaagtaaagatttaataaatttgttttgaaataaaataagttgaaatacgaaaaagacagaaaaggttttgaaagaggttttaaagaaaagtgcaggatattcattggtaaagatgttggtgagaggcttggaagcaaaacttcaggggaaaaagacaacatatggaattgaccacaattgaatttacaagtgaagtggctttacagaggaatcaggggatgtttctgagagaggaaattcattaaattctaacttgaatattttctgtttgcctttaagtcagagcaaaggctttgagtcccagcttcccagtttgtgaccttgagcaattgcttaacttttccaaagcctccaatagtcttcactctaaaataaaagataatcatatgagatattgtatgcagggtatttacaaggagcctggtacttggtgtacctaatgtatgttagttattattattaaattagaggagcaaaaatttctctagcattgactgctcctgacataatcacaccgaagaggggatacacgatgataaaaccttcctgcagtagtggctatagaaatgatgacggggagaagatctggaaaatattccaaagaaggctacagatagatacattttttccattggaattaggcaatggagttaaacagaagttacaatatggttgaaataaatgtatttttttaaaaaaagatttctctttccttaattattaaaaaatatacaattttgtagaaaattttaaacaaagtataaagaaaaaaataaaaatcattcataatcctatcaaagaagcattgttaattttttctatatatcttctttttccacgtgtatacttggaaattaaattttctaaaataattttcaggaaaaacaaattttaattaattgagcttctactaaataggactgaaaagcaaaacctggactagaattctctctcggtgtgtgtgtgtgtgtgtgtgtgtgtgtgtgtgtgtctgtgtgtacatgtgtatgtgctgtgtatacatgtgtatgtggtgtagcgttcccctgattcttaacttattaccagtggacaaccaccgtggaactagagtctagtcattcttaacctttttgggggaatcacagtctcttttttgaatctgatgaaaatcaaggaccgtttttacagaaacgttctcatctgtgcatacatgagacattttgcattgcatagaatttccgagggttcacagatactttgaagcccaaaagtgatccacagaccccagattgagaactcctccgctatgccatgcttaagcttatttctgtgtatcttctttctgaggagcaggcagatgggtcatctttacaatgtgaagttcttggcatttttattttgttttgtttttctgcactacgatggagcaagcaacactggaggcaactggctaaatgcaaactcatgaagcaagaccaaaatggctggatagatagatgctgtttggttttgacaacctagaaataaccttgaagaaatcctatggagaagtcttaaagaggaagattggattttgtagactcaaagaatgtgtcatggtttggcttaatctaagccatttttattcttcttttcttgtgtttgggtctattatctgtctgtagaatttatacagtgagactgctggggaaagtcttatgtctaattatttgctgtgctgtgtggagtgtactgcagacagtcaataaacaatcaatagtaattgtagcctgcctcagagacaggagttagaaacttcaactggcttaggtgcatggtatttttcattaattttcttctgctagtttttttctctaatttaaagcctaaatttaaagattaaatagaaaagctttctttgcttatgagcacaagtaggcactgtttttaaaagaaggaatatataatcccaggtgttttacctctgttaatgagaaagatgtctgtttgcttcagattgaatgagcaaagaagaggacaaggatatttgcatggttaaatgcctatgagcccttccttcagaaagtaatattcccctgatgtcaattacttttatacggacatctggatgtttatcatgagagtgtacagatgtcaactttttcagtattatagctggaaatgtggtgataacttgactttgatttgagtaaacataaaatatctaacatttaaagtcagaagttcacttcaggaaggggtttaaactgacatttattaaaaagaatggttccttggaaaaaacatcagaaccatccctaaagatacagtcactctgataaagtaaacagagtcccagttatgctctgtgtaacaaataacagaacttgaacatgacatttatctgttccttaaacttacagaagctggctctgaagatattgacatacttcccaatggtctggctttttttagtgtggtgagtgtcttcttccttccccaaattcagcagaggagatacaagggtatttgatgagggctgcagaacagtaagttgcttttaaaattcattttccaaaatgcattctgaagaaaagagaggtcaaacaagatcttggaaaacttcctccagcttttctaaatgtagagatgaagactctttgcccattgagatagtgttctttatttccccattgcattgcactaaaatattccaatgcaatctgtgttttgttttgttttttcttttttaattttttttattttttgagacggagtcttgttctggttgccccggctggagtgcagtggcatgatctcagcttactgcaacctccgcctcccgggttcaagcaattcttttgcctcagcctcccgagtagctgggattacaggcgcccgccaccatgcccggctaatttttgtatttttagtagagatggggtttcgccgtgttggccaggctggtctcaaacacctgacctcaggtgatcgcctgcctcagcctcccaaagtgctggcattacgggagtgagccaccacgcccagcgcaatctgtgttttaaatgtgcactattaagagggatatttgaggtcttactgtggatactcaatactaacattatactattttaaatacagcatctactcatctttctattactattcaacttgaagcaaatattcttgccattattatttattttcaaatattataccaaccttgcccttttgctttctttcttttttcccctgaatagccaatcataagtggaaagtcattgagtttatttacacccttcattttgccttgattcttgtaagctgaaaaacaatatcctttctgggtatacaatagaaagactttaaaaacaattggcttgtgaatattgttgtgaatattgttgaaactagcttgtaacaatgtccattctaattggaaatccagataaggggacagatgaggaggttctgaccacctacctccctggcttgggcagacataggagttcttggcatcttcataggtccagtttttctggaggaagaagtaaccaactctgacacctgactgtaattattccatttcctctcaacatccattattttcaggctctgagactcaagagggatgtgaaatactgggagatacttagaagggagtcaccacactaataaaatagttgttagacttatgagaaaggtgagagaactcaggttggagtagaatgagaattagaacactcttcaggttcctgatggtttttatgtgaaagacagtgagcagctggttattaccactgaggcaataaagagatactgtgggctttagcagaaacaccagtatatgtatttagtttttaaaataaggttttaaaaggaatgttttatttaattgcctacacagaatgaataaagtgatatttatagtaggactctgggtttgtttaggagcacatgcttgcacatgtgtggcttaggaaaaaccactgggaccactagtctaaaatattcataagtaaagatgcaaacattctgaataaagtagaaggcagttgcattgatttttttatttgtttatttgtgttttttgttgttgttttgcaaggatgtgttcttggagatttttataatctagaattcacctatttcaagatttctctccagcccccatagtaataaatctgaagtaggagggatgaggtctccaaacacataaatctacagccattttagcttgggggcatgttatagttacaaagatcttatagccatatcaatagaactttttctgctttttttctgttaccctcctttgctcatttgactttttttaaaatttagaaacattcccagtttgctgctgtttttcatttacttggcattgtctctaataaaacctagagtgtactctcttctaaataaagaggtcctacattgtggaggttgttcattcttcttcctagcattttagctcatctaacccaacctattttacagttatgggttgagggtcacctcaaaactaatgtcacacttcatgaagaattggatgacatagaataaaatataaaaaatgtaaacaatgtgagtgtgcttaacaccactgaactgtacacttaaaaatggtgaaagtgatgaatgttgtatgtattttatcataattaaaaataaatttttaaaaagagaaaaaatacttaaataaataaggagtgcgaacataaccatgactagttatcaccatctgatagtgcttcctttgcatgtaaatcatgcttttgttttggggacattcataaagaatagggattaactgaagtggcactgccatgtaacaatagcataattccagtttgttctacttaccaggcttgccctccatgaaaatatacaattgtagataatcttttttaattggagagatttcctcttatgtccaattttatacataaagtaagacttttttattgtgtgcctaaatttgtgtaaatatgactgcatcgtattagtaaactgaattaggtagtgcattcacataaaatttaacatcaccaagaaggctttaccttaagaatgtaatgatgaatcaccattttagatagactgataggtaatttattaactgatttaaaagagaaaagacctatatcatctcagtgagtaccaaaaagcatttaataaaattcaatactcattcctaaagttccaagcaaactagaaagataaggaaaattcccacaaaactacagcaaacatcattcttgatggtgaagcattggctgcatttgcattaatgctcagaacaggaagaaaatacccaacaccacaaccatcagtaatctactagagttcttagtaattcagtaaaacgagaaaaagaaatgtgagatagaaaagaaaaagacaaaactgtcattagagaagcagggactggctcaattgcccaggctgatgtgcagtagtgcaatcatagctcactgcagcctgaactcctaaactcctgcgctcaagaggtccttccacctcagccttccgagcagctaggactacaagtgctcaccataacactcagctaatttttttttttttttttttttttttttttgtagagacagagtcttgctatgttgcccaggctggtctcaaactgctggcctcaagcagtcctcccacgtcagcctcccaaagtgctggaattataggcatgagccaccaggcctgacctaaagctgtagtaatttaaaaagtgttatattggcacaggaatagacatgagacattaaaataacaaaacagagagtccctaaatagaccaatatgtaaatgtcagagatctagcacatgataaaggtgatattttgaatcagtgggagaaggatggactgtatgccaggcactgttccaggcactgggatctagcagtgaacaaatttccacagtcagtatgtagatgtcacttttctccaccctcagctctccctggaatcacctagtccaccaaccttctgattactctctgaagagaataaatccctgatcttcttttcagttattttcaggctttcagtattccacctccccgttattattttttctgttatcttttctctgttttttgagtttttgtggctttatgccactactttaaccacaatctctatttatccttcatgtacagttcccatgttagtccataaaaatacttaagcttttgtatttaacatttttcaccgttttggaaagggtctaaaattcccaggactccacagctttgcaccagataagcctggaggaatactaatgatggatctaaaagaagaaaaaccaagggcacgggaattaagaatcagtcgtgggtttgatttggcctcattcaatccacatggcatcagcactttcatagacaacggtaagagccaatgggctaccaacatttagtaacgtgtgatggttcacaaatgactgtgaaaaatagatttggatcatatttctaggaagagaagaacaattaactcatgagtgatttctgtattcttcattacaaagaacttgttcatttgcctcttcagctggcagtaagttatgctacattttgaaattcctaacaggtaacacctgaaagaatgtttagatttcataatcttttcatatacctacgatcatcacatttaaaaaagaactgtatttttgaattaaagtagaaacagattatgcatgaattctgtatatggagtaggaaacactttcttaaaggtcagggagccaatgatcagaaataacaccagacggacagcaataggaaagacagagaatgatctgttaggtcgtctaacagcttatacattcaacctttccttgcctgtggtatttaaatgtcagtgcctgcccagaggtcccgtagttatgtcttgtaaattaactctgttctttcaattctttagatgacacagtttatctctttgttgtaaaccacccagaattcaagaatacagtggaaatttttaaatttgaagaagcagaaaattctctgttgcatctgaaaacagtcaaacatgagcttcttccaaggtacttcctcattttgttccttctctaatttatccccagcatttgcaaacaatccctatggtgggttgtcctgtcatcttttataagcgctaatgtatatattagctaatatgtaagagctaaagagcttatatttccttatttataaatgtgtgtgtatagtttccttataaaccagggcaagcatggcatatgaaagttgatgtcactcatactattcactgttctatgcggactcctttgagaaatgatgaagtgcccgactacagggtgatactcttcaggcccatcttgagggtagaaggcaaaccctaacattttttcctgctgtcaccctccatcttagatgactcatcacccagatgagtgtcttgccaaggaagaatggcctgttttttattgggtttgtatgctttgcatgggactttataccaatcgctttcatagggttagtgatggttgcatgctagtaatcccacagaattagagccactcaagttgagagtgagtcattacacttcaagaacataaagctggttgaaaatgtggctaagagagaatcatgtgtacccccacccccagttcagtgtgtattagcctactgcttcttttagtttaaacttgatgaatatttttaatttctaatgaaatttcatttctaatgaaattaaaaatattgcctatctagggcctatctatgcctatctagggcataagcatgtaacttccaatcattccttccaaaaatgcacttgataaaaaaaaataggagcataaataccatccaagcattatggtgctctttcagaaaaatgagacctaccttccctgtagctctatatttttcatttagcaaagaataaagcagctctttcagaaatttttgcatagagtaattggaatttaaatttaataacaccctcacctaactggtcttaaaatgaaattgtttttagcatataaatctctcacctgaagcattgtactatggcaattttatcatccatctctctgcaagtgtttattgagtgcctgttcattctcggcatgtcagctttgtgaagcaggtagaaattgaacagtcaaccttagtttgactaataactaagccagggaaattagaaaaatccaggaactgagtaaatggaagctaggtaaatgttactgactgcctaaccagctcaccagccaatcaggctctctccagctctgtactgtggacagctctgtccttacgtataattgttaaaccctacatttcttgctgtcaaaaaacatgccctgatggcactaagttctttcttctcttatggtaatcctgccataattgctaaatgacctgtgttcagattacctggtaccatacaaaattgttctctggcaacaatattatagtatattgtatatgactatagtcgtgatttttagctcgtcttttcctcttaccaaaaatttaaagcacatgttgcataaatcttatgagtacttaatatttaatatggagaccaacaggccttttgtttcctctcacatgctatttttctttttcagtgtgaatgacatcacagctgttggaccggcacatttctatgccacaaatgaccactacttctctgatcctttcttaaagtatttagaaacatacttgaacttacactgggcaaatgttgtttactacagtccaaatgaagttaaagtggtagcagaaggatttgattcagcaaatgggatcaatatttcacctgatgataagtatggccccttatagaatatcttcatttttcttcagttgtggtgctggccaaattctttactttgctttctttgtcaatgtgaaaatagttttcttgacatttatggtatattatacatataatatatagatacactatatatataattatatatgttttgtatatatatttacatatacttagtcacatgtatttatatgcaaatacaataccatatttaagtaaactatataatacagtaatatatatgtatttatatataatatataaagtttggaatacatcattgtcaaatttaattttataaatataaattttaaagtgtgatcatactgatgcatacatattgaagtatcaggtatttccttttaaataaatgtattatttttattggctatacattattccattataaggatgatcttaaactaatttaaccaattctctattgatggatatgtgtataggggtggggagttctacataaaaaatattttatacttcttatttaccatggaattttaaacaagtattttttttaaagaaaaagtccctaggagagtgttttttttttgttttgttttttggagatggagtctcactccgtcgcccaggctggagtgcaatggcatgatctcagctcacctcaacctccgcctcctgggttcaagtgattctcctgcctcagcctcccaagtagctgggattataggcatgcgccaccatgcttggctaattttgtatttttagtagagatgaggtttctccatgttggtcaggctagtcttgaacctccaacctcaggtgatccgcccacctcagcctcccgaagtgctgggattacaggcatatgccaccacacctggctctaagagagtattataacataatggttaaacttgcagattttggactcatacaggcctgggttcaaatcccacccagggcactggctaaatggttctatgagctacttttctgtagaacagacccctagaaatagaactatttgctcaaacagtgtgattcttttaaatgttaactttaatagatattgccaaattgtcctccagaattatctcattatttttatatgcacaaccacaacctataagagaagatattaaattcttgatagctttcttatctactgcctcagcacactgaaaaatttaaactactacaaatacaacataaaataaatttggcactccttgacaactaaatgcccttatttttgtaatccaatttctcctcctttcttgttgactatagaaaaagaatgtagaatcatttaatttaaattgtctctaactgacctgatccaacctctgcagccaaatctgtttttcactcttatatttccattatgagagtcaaactttccaatcacccaagctaacaaaaaaataacaataatgaaaagggagaatcagcttttactcctctttcaccattcctatccagcctgtaggcaggtcctgttggttctacctgtgcctccttcctctacccccaaactcctttccctttgagtgagacctgcctaatttaggttgtcatcctctctgactagcatatgagactttcttccaatttgttttctgtctacttggatttttttcactcttgccaattttgtctgtctatctctattagccttgaagggctccccaaagagggaactctgtcttcctcacctttgactccttatgccagtacagtgccaggcacaaagcaaatgctcaggaattgtggaacagaactgaccatttgttgccactttattattctaagatttcagtggaatccaattgcttatcaaatcaaggcagggtaaagggttggactttgtttaacaggccacctccaacctcccttttctactatttccatgctttctatgctttagacaaagaactcattgttttaaacattccttcctcttcttgctcctgtgattctgctcttgtgcttgcttctgcctgggaagtgcctcctccgtcctcatctcaaatctcatctctctttacacagccactgcagatgccccttccttggtgagcctttctgtgtcctcggaagttagctatttctagacctgaactatttctcatgcttattaggtgtttaatgtgtacaaaccagtgagatttgttccaacacactataaactttcaaggagagaggctgtgtcttcttcatgtttatatctgctgcaacactgagttcatggcttttcacacataattgctcaacagagcaggtgccatggaaagtcaattcaatgagtaaaattacctcaaaatagtctgttaattcactcacctttgaagtagacagattattctgcattgatacttatctcttactcttaaaattcgctatgtattaataaatattttattgaatattaaggaatgatcactattttaataagatgttctttaccatatatttctatatgtacatgataattagaagtatcaaattatattgtggaatgtaaaagcttttcttctgaagccaagcatttgttttattgtcatttcagtggcaaatatggacttcatattcaaaatgatgttctatattatttttccttacaagctttttgaaaaacaatttaataattccatgattgttgtagcaccactgaattgattctgaaagcttactttttaaataaaaattgacctttatcaagcattccttgagggcccatgattgattaacttcttggcaggttattaagacttattctttcacactgtattaatgaagctttatattggcatggagctctaaccactgtgtcctttctgcaaaggtatatctatgttgctgacatattggctcatgaaattcatgttttggaaaaacacactaatatgaatttaactcagttgaaggtaaaatatttatttttacatatagacagtaatctattatgctttgcaatgacatagtttttctataagagtaccacacgtagaacaaaatatggatgccagtgtagctattctgggtttttaaatactccctacaactagagaaagctcctgtttccagcgatctcaagaactgaccatgattacatgcagcagcaggttgagagtgatattcatcagatttagggcccattccatgaagtattgatggcagtggaagaattccaataagaattttcacaattgaaaatactaatagatgaattctcaaatgaaggtttatgcacagtgtcagttctttcaataatacatgaaggtagaaattgggttccacaccattattattttcttcctactcaacaacacatattttaggttgattaagaatttcctatcttgctttgattgagttccttgagctaactgatcattgtgcatcttttaaaggaaaaggagttcagtttttaagatagatttttacagagaccgattatcaccctaactttcttaatttcagggaagaagaaaagtggctccaaaccagtttttaatacattccttttaagcaatattggtgttagaaggtggaagcagggcgatgtgtaatttcctcacatgcatagaggcaggaaggttacctctaaattatttaatcaagtttctcatgtcatttagattttgacaatttctcatttggaaggtacttgagctggatacactggtggataatttatctattgatccttcctcgggggacatctgggtaggctgtcatcctaatggccagaagctcttcgtgtatgacccgaacaatcctccctcgtcagaggtttttatattttcagttttttaaacttaattattcaagtccttttgaactaataatacaataaattgtcacagggatgatttgtttagttattttaaagcaataatataataagcttatgtcgtggttttgtaattgcgttaagccaataattggcagaatgttacattgttcaaatactttaagaaaggtaatcttttgatgtattaaattatggtggaaactagtcaaaaggcatttttataaagacatgtgcccttcttgggtggtatactggcaatttttaaaatatctgatttattgtcagctcaccacatgatgtgatatttgttcatgttgaagtagtgtgaaagtaggcacattagtatgaaagtatttctattaaagctgaattgctataataacactaaatcctgtgttggcatggaataactagatggttttaagaaagtactttctttgaagattggagaaagtactttaatttaaacattaaaaagattggtaactgctattttcaacagcatgtccccttaatcagtgtgtcattgtggaaaacagggcttattgatgattgagtgacatgcatgtacggtggtcttatattcatactttgtatcccctgaataggttctccgcatccagaacattctatctgagaagcctacagtgactacagtttatgccaacaatgggtctgttctccaaggaagttctgtagcctcagtgtatgatgggaagctgctcataggcactttataccacagagccttgtattgtgaactctaaattgtacttttggcatgaaagtgcgataacttaacaattaattttctatgaattgctaattctgagggaatttaaccagcaacattgacccagaaatgtatggcatgtgtagttaattttattccagtaaggaacggcccttttagttcttagagcacttttaacaaaaaaggaaaatgaacaggttctttaaaatgccaagcaagggacagaaaagaaagctgctttcgaataaagtgaatacattttgcacaaagtaagcctcacctttgccttccaactgccagaacatggattccactgaaatagagtgaattatatttccttaaaatgtgagtgacctcacttctggcactgtgactactatggctgtttagaactactgataacgtattttgatgttttgtacttacatctttgtttaccattaaaaagttggagttatattaaagactaactaaaatcccagttttgtctgtgtttaattctgaaggcatatggctaggagaaatgggaaagcagctgcttccttatggagtttggataggcaagcatggccatattaatttctcttgtggaaagctgaaagtgaatggactcttaatttgaaacaacaacaacaaaaatcaatgaaatattgcaactcaaattcccagttcctaaggaggtttccatcagctctcttccttaatgggagtccactttagagacaaagaggaaataagggttgggacaggaaggtcttgccacctcctcattgaacagaactgtgaactaaagccaggagaatgaagtcagtcgtccgtgaccacatggttaagcagcagcaatgctaggatcagggccgcgtgcccagctcacagagggagagtttttctgctcactgtacctcctataaaatcatcataagccctagagagagactttcatgtgtttctttccattgtaatttatcaaaccactttacttcacttctcatactttttccctatcatcatcatgaaaatatttgtcagttaattacaatatgccaaacaatgcaatgaaagtattacattcgttatcttatttaatcctaattgcagcctggagtaagtattgatattatatcactgttaacatttcacagatattcagtctatttctgatgccagagcctgtaccgctaaccactacatgatgctactgccatagaacgaactagtattttattactgtttttcctgatgtatacagtttcttcatgttttgtagatatgtttgagttctgcttttagatgaatcatttaatggattttaaatttaaatttcagtagtattcttaaatttggcctgtatccatt

SEQ ID NO: 1982 - DNA, 1198 bp, Homo sapiens
tatatatttaagtagtttgctacatattgtattggatttatttcatgctaaaataattattttcttttttgtttacattgtccatgggaaaatgctaagtcacagatgaatacagcaagattaaatattgcagacctagggatccaaatgaagaactagatgttttagattttatgagattatatcagactatctaaaaagctacatttataaaaagtactggaatacagtaggcataaaacaaacttggtttctattgcatttattacaaattttagaacaaaaccatgtcctttgcagcaacatggatgcagctagaggtcatcctaagcaaattaatgcaggaacagaaaaccaaatattgcatgtcctcacttataagtgggagctaaacattgaatacacatagacaaaaatgggaacaacagacactggggaccactagacagaagggagaatgaggctatgggctgaaaaactaactgttgggtactatgctcatcacttgggtgacaggaccatccatatcccaaacctcagcatcatgcagtatacccaggtaacaactctacacctgtactctttcactaccccctcaaaaaacactggggagtacaatttgctggatcatatggtagaagtatgtttaattttgaaggaaactgccaaattattccaagtggctatactgctttgcatttgcaccaagcagtgaatgagagctcctattactccacatcctggccagcatttggtggtgtcagtattttggattatactattatgaagtggtatctcattttgatttccaattacctgatgacataaaatgttgaacattatgcttgtttgctatctgtatgtcttctctgataaggtgcctgtttataccattggcccattttaaaaatcttccttttgttgttgttttgttttcttattaagttttaagagtgctttgaatatttggaataacaatcttttgttaggtatgtctcttgcaaatattttctcccagtctgttgcttgtcttctcattctcttgacagtgtgttctgcagaggatatttatttttaaaaacaaaatcagggcacctctataagataatatagccacttcaaatgatactacagaatattagcatagacatgtactcacagtgtattttgaataaagcatgcaagtattttaaaaaaa

SEQ ID NO: 1983 - DNA, 682 bp, Homo sapiens
cacttagaaaagagatgtttatttttatttttctctcatcagtcttaaggtaagtgaatggcctagggtagttaggtgactgtgttccatatggtcattcaggggcaaatgctgatgaagcaacacagctgtcttcatctaagactagaactctgcttgttgccatttcccagcaggaaggggttgaaagaaaatttatgtagatttttttttctacccagtagttgcatatatattgtattctcacatcctattgacccaaacttagacatatggccacatctgtcagccagaaagggtgggcaatgttatctatagctgtgttgctacgtgcctattgctaaaaaggctaaaaaggaagaaggggaacatggatgctggtgaacacttggccacctctgacacagataattgctaaagtaataagaagagatggaaattaaatgtgctaagctaggagactttctaaagaaagggtttgtcatgctacgctgtgccattcatgtgtttttttgctcatgctgttccttgtgcctggaaattctccccctaattcccctgagcagtggatgcagtggataccctccccagatcccccccaacttccctgagtgttggctaccaaaagctctgagtgcacccagggagctaagtcctcctgcccacaggcaataatggactg

SEQ ID NO: 1984 - DNA, 858 bp, Homo sapiens
ccagctagataaacctgtcagcggagaggtttggggggatgtttttttcctggctcaccgtccgtttgccagatccgtgccttctggtctacaggtttgattgacccgttgcgtggtgactcatgcttctgcttttcatagctcgcaggccagcgttgcttttcagaatttatacacaaacaagaactaacactcggagctttcgcctctttgtagagcttacccgtagagaaaggaaagaccacccggatccaccctaggacctcattttgtacagcttgaaattatgggaaggggttgggccgggggtaaaggtgtggagaaagtggaaggagaaagtgcttaattaagattgtctttgccttggatgtgccttgtgtctttggcttcttctgggcacattgttctgacataaaggttgcctccttgtgggggagaaggggaggattagtttgttggcttgggcatttgatcataaattatggaggtgctggaccggaggaaccacccaccagcccacggaggctaccgggcattcaggataagggccgccttcttcttcagaataaccatacccactccctctgaaacaaagtggagagtcttaggtctgagtggaaactctaaatcttttaattcttggttcaactttcttcatctgttttcctggttcagactaaaacatctaactcagctggagaagttataacgctttgttgttggacgtggtttctcattaaatacattgcactatgctggtataagcacttggaaattctagtgctgtattgtcatagtaagtagagaatatagaaaaggcaggaaaatcgtgcaagtcggttactcctcgtcttccca

SEQ ID NO: 1985 - DNA, 406 bp, Homo sapiens
attttttttttttagtagagacggggtttcgccacgttggccaggcaggtcttgaactcccgacctcaagtgatccacccgcctcggcctcccaaagtgctgggataacaggcgcaggaaacccaaagtcactcagaagtttgcgtcttaccactgggtagctcttagttcgttcttattttatgtgtccataagagcagataattcttcgtttcaattggaaagaatacaacagctggagcctgagcaacatggcaagacctcgtctctacgaaatttaaaaattagccatgtgtggtggcgtgggcctgcagtaccagttactctggaaggaagaaatgggaggatcacttgagcccaggagatcaaggctgcagtgagctgtgttacgccacttcactccagc

SEQ ID NO: 1986 - DNA, 3564 bp, Homo sapiens
caatattaaacagatcaacaagacagaaggttaacaaggatatccaggacttgaactcagctctgcaccaagcagacctaatagacatctacagaactctccaccccaaatcaacagaatatacactcttctcagcaccacatcacacttattctaaaatggaccacataattggaagtaaagcactcttcagcaaatgtaaaataacataaatcacaacaaactgtctctcagaccacagtgcaatcaaattagaactcaggattaagaaactcactcaaaaccgcacaattacatggaaactgaacaacctgctcctgaatgactactgggtaaataataaaatgaaggcagaaataatgatgttctttgaaagcaatgagaacaaagacacaacgtaccagaatctctgggacatatttaaagcagtgcatagagggaaatttacagcactaaatgcccacaagagaaggcaggaaagatctaaaatcaacaccctaacatcacaattaaaagaactagagaagcaagagcaaatacattcaaaagctagcagaaggcaagaaataactaagatcagagcagaactgaaggagatagagacacaaaaaacccttcaaaaaatcaatgaatccaggagctggtgttttgaaaagatcaacaaaattgatagaccgctggcaagactaataaagaagaaaagagagaataatcaaatagatgcaataaaagatgataaaggggatatcaccaccaatcccacaaaaatacaaactaccgccagagaatgatataaacacctctacgcaaataaactagaaaatctagaagaaatggataaattcctggacacatacaccttcccaagactaaaccaggaagaagttgaatctctgaatagaccaataacaggctctgaaattgagacaataattaatagcctaccaaccaaaaaaaaatccaggaccagacagattcacagccgaattctattagagctacaaagaggagctggtaccattccttctgaaactattccaatcaatagaaaaaaagagactccctaactcattttatgaggccagcatcatcctgatactaatgcccggcagagacataacaaaaaagagaattttaggccaatacgcctgatgaacattgatgtgaaaattctcaataaaatactggcaaaccgaatccagtggcacatcaaaaagcttatccaccacaatcaagttgggttcatccctgggatgcaaggctggttcaacatacacaaattgataaacgtaatccatcacataaacaaaaccaatgacaaaaaccacatgattatatcaatgcagaaaaggccttcgacaaaattcagcagcccttcatgctaaaagctcgcaataaactaggtattgatggaacgtatctcaaaatagtaagagctatttatgacaaacccacagccaatatcatactgaatgggcaaaaacgggaagcattccctttgaaaaccagcacaagacaaggatgccctctctcaccactcctattcaacatagtgttggaggttctggccagggcaatcaggcaagagaaagaaataaagggtattcaattaggaaaagaggaagtcaaattttccctgtttgcagatgacatgattgtatatttagaaaaccccattgtctcagcccaagatctccttaagctgataagcaacttcagcaaagtctcaggatacaaaatcaatgtgcaaaaatcacaagcactcctatacaccaataacagacaataacagagagccaaatcatgagtgaactcccattcacaattgctacaaagagaataaaatacctaggaatccaacttacaagggatgtgaaggacctcgtcaaggagaactacaaaccactgctcagtgaaataaaagaggacacaaacaaatggaagaacattccatgctcatggataggaagaatcagtattgtgaaaatggccatactgcccaaggtaatttatagattcaatgccatccccatcaagctaccaaagactttcttcacagaattggaaaaaactactttaaacttcatatggaaccaaaaaagagcccgcattgccaagacaatcctaagcaaaaagaacaaagctggaggcaccacgctacctgacttcaaactatactacaaggctacagtaaccaaaacggcatggtactagcaccaaaacagatatatagaccaacagaacagaacagaggcctcagaaataacaccacacatctacaaccatctgctctttgacaaattgacaaaaacaagaaatggggaaaggattccctatttaataaatggtgccaggaaaactggctagccatatgtagaaagctgaaactggatcccttccttacaccttatacaaaaattaattcaagatggagtaaagacttaaatgttagacctaaaaccataaaaaccctagaagaaaacataggcaataccattcaggacataggcatgggcaaagacttcctgactaaaacaccacaagcaatggcaacaaaagccagaatagacaaatgggatataattaaactaaagagcttctgcatggcaaaagaaactaccatcagagcgaacaggcaacctacagaatgggagaaaatttttgcaatctacccatctgacaaagggctaatatccagaatctacaaagaacttaaacaaatttacaagaaaaaaaacaaacaaccccatcaaaaagtgggcaaaggatatgaacagacacttctcaaaagaagacatttatgcaaccaacagacacatgaaaaaatgctcatcatcactggtcatcagagaaatgcaaatcaaaaccacaatgagataccatctcatgccagttagaatggcgatcattaaaaagtcaggaaacaacagatgctggagaggatgtggagaaagaggaacacttttacactgttggagggagtgtaaattaattcaaccattgtgaaagacagtgtggcgattcctcaaggatctagaactagaaataccatttgacccagccatcccattactgggtatatacccaaaggattataaatcatgctgctataaagatacatgcacacgtatgtttattgtggcactattcacaatagcaaagacttggaaccaacccaaatgtccatcaatgatagactggattaagaaaatgtggcacatatacaccacgaaatactatgcagctgtaaaaaggatgagttcatatcctttgcagggacatggacgaaactggaaaccatcattctcagcaaactatcacaaggacagaaaaccaaacaccgcatgttctcataggtgggaattgaacactgagaacacttggacaaagggcggggaacatcacacacgggggcctgtcggggactgcggggctgggggagggatagcattaggagaaatacggaatgtaaatgacgagttgatgggtgcagcaaaccaacatggcacacgtatacctatgtaacaaacctgcacgttgtgcacatgtaccctagaacttgaa

SEQ ID NO: 1987 - DNA, 3262 bp, Homo sapiens
gcattatggcatagtgattaagatgagggaccctggaaccagcccgtgattttgggcaagttattttaggtccactttggactgcttcatctcttaaatgaagacagcaaccaccttcaggagtgtgaaggtgacaacacttaaaactgtgcctggcacattgtatttgctattgtcttaatgttctggaataatggtttccataacttgggaagaaaactttgagaacaggattggttacatcaagttgtatagtgaaaagataaagatttgttatttaaacttgcagtttaaagtcattagaatcattcttttccgtaaggctttctttgcaagagatctgcattaaataaagttgctaggaaataactaaaattggggaaataatctaataatagcaagatgttaagcatactattattgtattttgggggttggtaataacattcacatggatttatcaatacacactgagaagcaaagcctctcaagctgtcccatatcctccatttcaaaggcacacatacattttaggtaactcataatttagaaaggttatttaatcttttccacatgtaaatatttgaatatgtacaaagacttgatttgactcttgtctgtttttgttttgttttgtttgtttgagacagaggctccgtcgcccaggctggagtaaaatggcatggtctcagctcactgcaagttccgcctcccgggttcacgccattctcctggctcagcctccggagtagttgggactacaggcacccgtcaccacacctggctaatgttttttgttttttgggtttttttgtatttttagtagagagagggtttcaccgtgttagccagggtggtctcgatctcctgacctcatgatccgcccaccccggcctcccaaaatgctgggattacaggtgtgagccactgcgcctggccgactcttgtctgtttgaatgcaaagttctcaatagtggtttttgtccataagtattaacttataattttggagagtgataggtatggttgctggttgattagcaataagattatgtagccttaaactagctagaagagtttgcatgggtgaggcaacaggctgttaacaaaaagaaactggaaatacagtttcccctgtttgtttctcctgtttgtacaatctgctttaaaaacaagtgaacatgcaccatgtcagtcatggtgaatcggccaacagccagcccttgccagttgacatcacagtctaagatgggaaactggtacagatagacatgaagagagcttagcagtggttgaggtggtgactaaatatacagtcattgaataaataccgtgtagcaaatgtaaaaaaaaaaaaaaaagtacaacagaatacaaaagtgccatttaatattttatagctatttctatgcacaagtgctggttttaaatttatataaaagcaaagactgtttctgtgttttcttccagagtatttctgttacagccatagaagtaaagttaataaatgtaagactttttttgttttgttttgtgccataaatgtaagactccattttgtctgcaactgctaagtgccactttccttttattatgggtagggatgttgctaaggatacttaagtagttaagagcaagatgaaagaagttacagattattttctagttggctaatctgtgttgaatacattttttatgatgatttttattgacaccacaggacctcagcctgtatatattgataatgtaaccaaagctgctcaggaattggggtaatttttcagtcaactcagaagttaacaggaaatccttgttacacattcttaaattttagataagtgcaagaactattaacaaaataacattaagcacttaccttgtagagctcaggcatcagccaggaaaaaaaatacaaataaattagcctaatgacctcatcttaaatacttgtgtctgggtaaatttttcagactgatcttgtgaatataatccaggataaattaaaaatgttggctggtccttgctatgtaatatgcttctgccctcttgtcccttcccatcactaaaaatgtattcatacatgcaactacaataccagttgacaaatacgatttagattttctgttgtgtggtatttgtctactattatagaacctcaagcatttctctaaagaaaactcttacacatcttggtgttgtggtttcatgtccaccctaatgagaaaagttcttccttagtagggtcatgtttcctgaggaacccctaccctagatttatcccatagtaggtcttataaataatatccacatactaaaattatttggcttctaatgttaagttttacactaatattgtaaaagtaactctacagtcaaaaattgtaatatttaaataagaataatctgccatccgagccattagcctttagcatctgtgttatattttaaaatgcctgcaaaaattgtctatgcgtaaacaagttgtttttagttatactgtggcttatttggttggcatgaaaattagattgctttgcatatctggggtagcataaccagttttatcagtggctagattatatcagatgacaaaaataacatgagacttcagaagtctgataaataaagtgatgatacctattagaagtgggtgcaatctatagccatcaaaatgtgatgcattcatattcaggcatggtcctttagcattcgagtgataggcacttttatttgagtctttgaatgaaagataggcttttaaagtggattaaaggatagcagtttttacttgataagttgggacccatggtaacagcaagcatcccacttataactggtgtccattcagggaaaaacagatgtaaccattatgtgactcaatacaaagaagaagattacactggtaaaaaatactaagtgaaaaaaagaaaaactagtaaaaaatactaagaggattacattagtgaagattcagggtgtgaaggtgtgaagtaaaaggagagaagattaacagaataggtttacctttatttgatctccttacagggatctatcttccatggtgactaattctcctattttggtgaaacttttcaggttgatggatttaaaagaatagtataaacccaaaattttccattttaaggtcatgattttattttttactctgtggttcttaaatacaatttacttcattttatataacacctgccaagaacaacctaataaacaagatctggtttaggtttaataaaattaaaat

SEQ ID NO: 1988 - DNA, 242 bp, Homo sapiens
ttacaggcgtgaggcaccgcacccggccaatcagttttttttgttttttttttgtttgtttgttttacaagaaacattaaaccagatcagaacaaagatttgtcagggttgtccattgactggggagaaagggaatcagtgtgtaaggcacctgagaggactcagttctacccaaattcttgcattcaaacctgaatgcaaggccatgaagtcctttgaaatgtacagatattaagcaattt

SEQ ID NO: 1989 - DNA, 752 bp, Homo sapiens
ctactcatatgtggctattattacgtagtgtattatgccattcttgtgttgctgtaaagaaatacctgagattgagtaatttataaagaaaagaggtttaattggctcacagttccacagactacaggaagcatggcagcatctgcttctggggaggcctcagggagcttttactcatggtggaaggcaaagagggagcaggaggaagagagagaaggttgaggtgccacacacttataaatgaccagatctcacaagaactcattatcacaatgacaacagcaagagtatgtggtgttaagccataagaaatcgcccccatgatcaattcacctcccaccaggcccacctctagcactggggattataattcaacataagatttgggtggcgacaaatatccaaaccgtatcacatagtacactcctagactgtgcttaaagccttctttaaggactctaaacaattgtcacagctaatcaaatctgcccaatgatgtgtagccccttatacggaagcccccacattggtttgaacataatacctggtactgaataatagcatttcaaactttaaagttagtttttcagcagtacactttttttttctctttctttctttctttctttttttttttttttttttgagaggaatctcactctgttgcccaggctggaatgcaatggcatgatcttggctcactgcaacctccacctccagggttcaagcgattctcctgcctcagcctccca

SEQ ID NO: 1990 - DNA, 692 bp, Homo sapiens
cacctgccttggcctcccaaagtgctgggattacaggcgtgagccactgggcttggcctgagcactttttatagtgtagcaattatttgagcattcagatttctaaagtaggatgcatgtggatggtgagtaaatggtagcagaactcagataagagtgggatgcagcagtcaggaatgacacccattcttttaaaccaagaccctgagtggggaaggcaagtcaaccaacactgactgtaggatcaactcaaaagctggtctttacatgggaacacattctggttactctaatggctttaagtcttagcaaccattactccgacatatactgcgtttttgactgtgactataactgccagcccatatctaaggtgcatttgcataccataccttttcctttttgatgtagccgtgataaccatcagcatgctttgctcaagtacttcatattcagtaggacttaccagataagaaactcaggagctgctcctctctgagccaatgagaaactcagttgctgctcctcccaggggcacttatctttagttgagttagcctttaatcagattgccattataactgggctctgttctgaaagaaagacctgataaatcttgtttgatgatgccaagtaagtcatgtctatttgcagatttcaaagattattgctaagaattcaggctgggtgca

SEQ ID NO: 1991 - DNA, 568 bp, Homo sapiens
ggtgagtaaatggtagcagaactcagataagagtgggatgcagcagtcaggaatgacacccattcttttaaaccaagaccctgagtggggaaggcaagtcaaccaacactgactgtaggatcaactcaaaagctggtctttacatgggaacacattctggttactctaatggctttaagtcttagcaaccattactccgacatatactgcgtttttgactgtgactataactgccagcccatatctaaggtgcatttgcataccataccttttcctttttgatgtagccgtgataaccatcagcatgctttgctcaagtacttcatattcagtaggacttaccagataagaaactcaggagctgctcctctctgagccaatgagaaactcagttgctgctcctcccaggggcacttatctttagttgagttagcctttaatcagattgccattataactgggctctgttctgaaagaaagacctgataaatcttgtttgatgatgccaagtaagtcatgtctatttgcagatttcaaagattattgctaagaattcaggctgggtgca

SEQ ID NO: 1992 - DNA, 88 bp, Homo sapiens
gtaatcccagcattttgggaggccaaggcaggcggatcacctgaggtcaggagttcgagaccagactggccaacatggcgaaaccccg

SEQ ID NO: 1993 - DNA, 88 bp, Homo sapiens; identical to SEQ ID NO: 1992

SEQ ID NO: 1994 - DNA, 469 bp, Homo sapiens
agatttttaagtacgaagtaattgccagtatttaaaagacatgagatttcccaatctggatttccaacttttcttgagaagtcataatatctggcactagtaggtctacagtcccatatgttggcagctggagccgaagagcaccactccctgtaggtgggtcattctctctctcctaccataatccccaccgcttcctgtctcagcggacctacttaagttgttcactttacttgcctggtctctgaaggcatttgagtttgcctcttctgctttaatctcatcctgacaggaggggtcgttgatttcaactggattgagagactgtgaaggaactcggttacaaatccataacaaatgactggaaaagccacacaactcttacatactgatatttagaaaggtgcttttgttctccagactccagtgattctgcactgggcattatggaagacttgtgatagatcag

SEQ ID NO: 1995 - DNA, 4810 bp, Homo sapiens
ggagcagcctttcagagaccgttccaatactctgaatgagaagcccgccctgcccgtcatccgagacaagtacaaagacctgacgggagaggtggaggtgagaggagagctttctacaaggggtgggtaacagaccagcaagcacacagggccccaagaaagaatgctgtcagctttcacatggggaaaatgaggggcagaaagacacaaagcaccagacataaactatgtaattaaagtgaggcaagggtaacattagccctgggtgaaaacatttcccaggtgtggcacccactgaaactaatcagtgaccctaaaaccaaaactattcatgggacttcacaaggatggcagtgtttgtataattcttcttgagcacttagactttattgtcttcatgaaacctcaaaatagaggagacagggaaaatattctgaattttttatttctgtctgctgcatcttagtgccacgctatgttcctcctatggtcaacacacttaatttcccacctttccctactccttgttacatgtgcacatgggccacgtcctcacacacagccacacagcgttataactggggcgtggaaagccagtggcttaatagcagtttctgtaccagatagctacatgctgagtgcctccgaagaaaggcttacactgttactgatggaacaaatgaggcaacactcacagggggaagctgctggaaagcatgtcccttagactcacaggtcctgtgctcagaagttacatttattagtaatttaacatagttattagtgagttcaaaaagataaactgcggctgggcatggtggctcatgcctgtaatctcagcactttggaaggccaagtcgggcagatcactcgagctcaggagttcaagacaagcctgagcaacatggtgaaaccccacctctaccaaaaatacaaaaattagcctcatgtggtggtgcgtgcctgtagtcccagctgctctggaggctgaggtgggaggattgcttgcgtccagtgcagtgagcagaaatcatgccactgcacttcagcctgggcaacagagcaagaccctatctcaaaacaaaaacaaaaacaaaaaaaacataaactgcttgaactagagtgatcgtaataaaaaggaaagtcctccaagcactttgaattgacagagtcatcaatagaagattccaggtttgtgtgtttaacccagttctttttaacaaattcacaggaaaatgagagatatgcatatgaatggcagagatgcctggggagtgccctgaatgtgagtatgtcacttacgcgttcacacatatgtgagtgctcttttgtgcctttttgccttcttggttcatttgaattgacagaggcaaacttcaggagagccttacttggatgtccctgggcaaagagtaactctgtggaagtcatgcatctaaggtgaggcttctttcacacttacaatagcagaccggctcatgtgtcagtcatcccctcatctgtcattgtgtttaagaaataacaaagtgatttcattaactctgactaaatcaaaataatatttaagctaaagaacctgtcttggctgggtgcggtggctcaacacctataatcccagcactttgggaggccaaggcgggcggatcacgaggtcaggagtttgagaccagcctgaccaacatggtgaaaccctgtctctactaaaaatgcaaaaattagccaggcgtggtggcacgtgcctgtaatctcagctactcaggaaactgaggcaggagaatcacttgaacccgggagtcaggggttcagtgagccgagatcttgccactgcactccaacctgtgctacagagcgagactccgtctcaaaacaaagcaaaacaaaacaaaaggaaaaaaacatattttctcttccagagaaatggaggattgtttcttcaaggataaaatgagattttttgacacctcctggcttttcggttgggttttctactaatagtaaattgatttgcaatgacttttctcagttatgtaaggtgatgtgatttcatttcttgtaggtcattaagaaggcaaatgataccttaaatggaatcagtagtagttctgtttgcacagaagtaattcagtcagctcaaggcatggaatatttattaggtatgttctttcatattttactattgaaaatgatggccctttgcattattttcagttttccctttaattattttaagctagatctctcaagttacatatgacttcagtaagaagcatctgtatttgtgggtaagacactcaagctacaggcagtaaactattggacttaattaaaaagtctctatggctaagtttcctcatccttgttatatacgtaatagcaaaaatgtaaaattatatctgtgttactggtttatcaaagaatctgaactaccgatgcactaaagtaaaatcatcttgtctcccatcaattccttaccatactctatattctttctctcgaccgcttaatgacaccacagagtccttaacctcctggccatctgcagcaatttgatgtgtcagtccaacgggaaagtgtagtctctgtccacttcggtgttcctcccttccccaagctcaggcttggcccgtggccagagccacacatgctggaccctaatctttttcaaatctttactcaaatgtcagcttctgagtgaaatctttcctagcatccatctctccaaagagtatcgtctctccctaccccggtacttcccatcccattctctgctggattttctccttagccctattacctttaatttcttacatatgttacttattattcttttcttttcttttcttttttaagacaggttcacactctgtcacccaggttggagtgtagtgatgtagtcatgactcactgcagcgtccacctcccaggcgcaagcaatcatcccacctcagcctcccaagtagctggaaccacaggtgtgcaccaccatgcacccagctaatttttgtagtttttgtagagacaggtttccgccatgttgcccaggctggtctcgaactcctgagctcaagcgacccacccaccttggcctcccgaagtgctgggatcacaggcgtgagccactgcacctagctacttgttgtttttactctctgtctcccttcactagaatgaacctccaagaaggcaaggattttggtctgttttgttcactggtgtgtccccaacacctaatctagtgtcttgcacgtagttggcactcaaaaatatttgctggatgagtggagagtgaagggatgtagtctctgccttactcctgccacctcacttggggtcttcttttcctgctcaaacaggcacagttctgcataagcagatgtccaccaggaaatggggcacctgtcttttctcctagtatccttgtatctatggaagattctcttagaagccccctcacttggcttagggtgggcagtaatttctgcccctctcttgggaaaggaagaagaaaagccgtagtgctgacacagggctgctgaggccccgctctgaagatcccctggaattcctccagtgttcacttagagagatcggggtcatgtctttggtgactgttacattgcaggggttagggatgtgtctggtggctgtccttagaatgtggaggtacttagcacctctcatccttgcttcaagagttcaaccacaatttagagaccataggaaaagaactgttctgcatcctgttatgtgtttaaagataagtgaagtcaaagtgtttgtaagaccttcagattcagaggggtgagatgtttcttcattactttgtgatgctattaacatttagattcttttaaatttttactatccccattttcagctagtttattgggatttcccagattcaaacagatggactcataaataaacctcccaaaaaacaaaagctaataacttgcatagtgcctgccattctccaagcactgttgtaagccttttaccatattaccctatttaatcctctcaaccatccttggaggagctactgttaccatcccaacttcacagatgaggaaactgaggtacagagagattatgtgacttgcctaaggtcatgtagccagtaagaggcatagctggggtttgaacccaagcagtgcagcttctatgctcttaccagtaagctatacagcagcattgagaagtggattggtcccaaagaatagtaagtacacctctgtccagatacacccattgtttctcacagatatcagcaagcaataatgctcccctgtctgggtcctctgtgtctccactgccaacactctctctctgctctctcatcccgtcaggtgttgttgaagtgtacagggtaaccaagcgtgtggagctggggataaaagccactgcagtgtgcagtgagaaactccagcagttgctgaaggacatcgataaagtatggaataacctaatcggcttcatgtcactcgccacactcacagtaagcccatgagacaactcagcagttgctttcctttccagaaacctaagttgtaaagcagagtgtatattcctatgatggtacttattagaggctggaggtgccaactggagcatgttatattaaaggagggagatcacaggtgtgtggtcagttgaacagtaccaggtgggcttctgatctctctaaggcccagtgaacctaaggaaaaaaccagtacaggaaaacattcactctggctacacctttcttaattcacataatacacggaagttttgcaaagcagtggtttgagatactccctttgcactt

SEQ ID NO: 1996 - DNA, 459 bp, Homo sapiens
cagggatgatgcaactcagggcagaaaactctctccatttgtcctctcagcaggaagtggatccccctcagccacctcaattcttcaaaagaaagagacttcatttggcagttctgaaaacatcaccatgacatctctctccaaagtaacgacctttgtaagtgaagatgctcttccagagaccaccttcccagctcttgccagttttaaagacacgattcctcagaccagtgagcaaaaggaatatgaaaacagagactataaagatttcacaaaacaggacctgcctacggctgaacggagccaggaggccacgtgtcccagcccagcgtccagtggtgcctctcaagaaaccccgaacgaatgttcggatgactttggagagtttcaaagtgaaaagcccaaaatcagcaaatttgacttcttagtagccacttcacaaagcaaaatgaaatccag

SEQ ID NO: 1997 - DNA, 27681 bp, Homo sapiens
aggggctttgatcaacaaggcctaaatccaacaactttgaaggccatcgggcaagcaccttcaaatcttaccatgaatccttccaattttgctaccccacaaactcacaaattagattctgtggtagtgaattctggaaagcagtctaattctggagcaacaaaacgggcaagtccaagcaacagtcgcaggtctagtcctgggtccagtaggaaaaccactccaagccctgggaggcaaaattcaaaagcccctaaacttactctggcctctcagacaaatgcagccctattgcagaatgtggagttgccgagaaatgtattggtcagtcccactcctctggccaatccccctgtacctgggagctttcctaacaacagtgggctgaatcctcagaattctactgtgtctgtggctgcagttgggggtgttgttgaggataacaaggagagcttgaatgtgcctcaggacagtgattgccagaattcccagagtaggaaggaacaggtaaacattgaactaaaagcagtccctgcccaagaagttaaaatggttgtccctgaagatcagtccaaaaaggatgggcagccttcggatcctaacaaacttcccagtgtcgaagagaacaaaaatttggtgtctcctgctatgagggaagcaccaacatcgttaagtcaacttcttgacaactctggagctcccaatgtgacaattaaaccccctgggcttacagatctggaagtaacacctccagtagtttctggggaggacctcaaaaaagcatctgtcattcccacactgcaggatctgtcttcttctaaagaaccttctaattccctaaacttacctcacagtaatgagctgtgttcatcccttgtgcatcccgaattgagtgaggtcagttctaacgttgcaccaagcatccctccagtaatgtcaagacctgttagctcttcctccatttccactcccttgcccccaaatcaaataactgtatttgtcacttccaatcccatcacaacttcagctaacacatcagcagctttgccaactcacttgcagtctgcattgatgtcaacagttgtcacaatgcccaatgcgggtagcaaggttatggtttctgagggacagtcagctgctcagtctaatgcccggcctcagttcattacacctgtctttatcaattcatcctcaataattcaggttatgaaaggatcacagccaagcacaattcctgcagccccactgacaaccaactctggcctgatgcctccctctgttgcagttgttggccctttacacatacctcagaacataaaattttcttctgctcctgtaccgcctaatgccctctccagtagtcctgctccaaacatccagacaggtcgacctttggtccttagctcacgagccacccctgttcagcttccttcccctccttgtacgtcttctccagttgtcccttctcatccccctgtgcagcaagtgaaagaattgaatccagatgaggctagccctcaggtgaacacctcagcagatcagaacactcttccctcttcacagtcaaccacaatggtttctccccttttgaccaatagtccagggtcctctggcaaccggcgaagcccagtctcgtctagtaagggcaaaggaaaagtggacaaaattggccaaattttgttgaccaaggcatgtaagaaagttacaggctctcttgagaaaggggaagaacaatatggtgcagatggagagactgaaggccaagggctagacaccacagctccggggctcatgggaacagagcagttatccacagagctggacagtaaaaccccaacgcccccagcacccactctgctaaaaatgacctctagccctgtgggcccgggcactgcctcagcaggacccagcttacctggcggtgctctccccaccagtgtacgctcgatagtaaccactctggtaccctccgagctcatctccgccgtaccgaccacaaaaagcaatcatggtggcatagcatctgagtcacttgcgggtggcctagtggaggagaaggtgggatcccatccagaacttctacccagcataggtatgtacttggggcttcatcatctctttgtgtcagttttttgatgacctaatcccacaagagaaagcatgactccttttttacttggaggaaagagaatgggctaaatggcaatagcagtagttttatttattgaaagtacgttggaaaatatgcttttaaatcccatgttaagtttgcattcattaaagagagctaagggccaggtgcggtggctcacgcctgtaatcccagcactttgggaggccgaggtgagtggatcagttgaggtcaggaattcgagaccagcctggccaacatggtgaaactgcatctgtactaaaaattcaaaaattagccaggcatgatggcacacacctgtaatcccagctactcaggaggctgaggcatgagaatagcttgaacctgggagcagaggttgcagtgagctgagatcatgccactgcactccagcctgggcaacagagcgagactctgtctgaaaaaaacaaaacagagagctaaggctctcaaaacaaagagttcctgaaataatgatacctttcatttatataagtttttcaatttataaggaagcatttttacatatgttgtcttgcatcatctttataccaactatgtcagatattcttaaccccattgtatgggtgagaagattgaagctcaaagacgttcagtgtttgttcagagtctatactgtgaacctcccatttaacactgtgccttaagtgtgaacagcagcttctgcagattctctttaccagggtgaagatttgctcatgactatttcagaacaatgggtcctcatagccccattctcactgtactctatctcaggaaccattctttttttgtctgggctactctagaggagagctggaagaaaactgggtttcatgataatggacacagtagaaacaaagtggtcaagagccagtaggcttgggttggtattataacaccagcatttaccagctatatgggcttgggcaagttacttgaccactccagactttggtttcctcctttgtaatatggaacaataatagttgtaagaattcaataaggtagtacatataacattcttagcacagaacctagcatataattattattcaataaatggtaaaaattgttattcccagtttctttttgatgtaatctctttgttgattggtacattccatttgtgtatctagttcaggctatttcctatgtactgttaagatgggctaatgatggaagcataggtgtccttacaaccgcccctccttcccttcttcccttccctgacatgttcctcctcctgtgaggcttaagtgaagaagctctatttccccagagtggagtcagtcacacactgctagagctgggaaagacctttacgatatcctaggccagctaattaagtgcctatcttatttatgcagctaaaatgcttcgagtgcctaccactgagtggtaagcacccaggaggagaggcagaaagaacacaaacttcagggtaagatcagagttcaaattctagcccactggttaccagttacagttgatacgttccttaacctctcctaagccatgtatttcacttgtaaaatggagatcgtacattctacctcccagaatttaggattctgagagaggactcaatgagaagatttgtcaagtggccaacacactgcctcacgcagagctctggaaaggttaattccccttctctctgcctcttcacctcagtgttagagagatgggggcaggataaaggccttcaagaagtctgctgctcttacaagagacagtcttcacaagactgggtgcttattgtatattgttctagttctgttggtgtagatgaaccctaagaattaaaagggaacctggtgtaaattaagtatatccttcactattaagtatttccatttctccttctttcaggagacttttccctctggtatcaagagaaaaatgatgaagtaattagaaattatttttatctggatcatatattatactagagaaatatgtgggccttgaggagatgaaccagcacttgggaaaagttctcaattttagttaagaacactcactttgcttataagtgattgtttctgttctttttcaaggggcttctgtgcttttactttgaaaatatgagaaattggccaggcacggtggctcatgcctgtaatctcagcatgttgagaggccgaggctggtggatcacttgagcccaggagtttgagaccatgccgggcaatgaggcgaaaccctgtctctacaaaaaaaatatgtaaaaattagctgggcatggtggcatgcacctgtggtcccagctactcagaaggctgaggtgggaggattgcttgagcccaggaggcggaggttgtggtgaaccgagatcctgccattgcactacagcctgggcaacagagcaaggctctgtctcaggagaaaaagaaaaggaaatttgagaaatgaacactaaagttaaaagtagaagttaagatatagttttaagctttatcagataagcatccaaaataaattcttaaacacaaatgcataatttactgctttgctaagcagggagggaaatatacaaaattcagtttccacaagagagtaaaacatgttgttgcagagtttatctaggattttagactgagatgtcaagatgtgactgtggcatatccatgccataatctttatcttccaggatggttcccttctagagggcattacatattttattccattccttaagggcctaagttctctgtgtcctttgaagcctgattctgatgtttctccctttaatgtaccttcagatttctcaacctagaattgctaactcttgctttggacttttgtagtattttatactttgtgactccttcatatgacatcagagtgcactcaagtgcactacatgtatatatcttatctttaatactagactgagttcctgatgtgcaagaggatatagtttggtctctcagggtacctggcacagtgccttgcccctagtaagttctttgcaactatttgttagataagtaaataacatatcaaatttatttatttattatgtatgaattgaatgcctgctttatgcccatcacttttgctaagtgctatagaaaagtacaaaattatgtgaccatttccactctcatagagtatagtctttagggagtgaggctagattttttaaatgctgaggggaatggtataattgtacctctatggtttgggttgcctactaagatatgctttggggctttttcaagtagtggtcaggacctgaccccaagaagcagaaaatgtgagtgctatgttcttatagccatctcttccccttattattatacatacaaaaaggaagagcctatacccctaaatggtagtcattggtactgggtgttatggtaattaatttttgtagtaagttttaaaatgtacttgtaatttcgaggccaattttgagtactgccctctaagagtacattgtttcagcagttacttagcccttgattaggttaatgctttctttttgtttagaaaagaaagtaaaaggtctgtaatttttttttccttgccttagccccgtcgcagaatttagtctcaaaggaaacttcaaccacagcactgcaggcctctgttgccagaccaggtaaggcgtactttggaaaaacttcttggagtgggatgggttacatgtgaaggaactactgctgtcctcaatgtcgtgtgttcttatgccaggaagtgacaggaactattttatctgtttgcttcagagcagactttggttgagtgacaaagcttgtgcagttctacttgagattattttccccccgaccagcttgctctctcatgcattcatagtgtcagctagggaactcaagaagggcaattccgtgcccattgtctgtctgccacccagccatgggtttctgttgcagagttttccctgttctgtgaccctggcacccatggttggcagctgaatagctggcatatggtgacttactgggctggcaagcattaacgcactttgtaattttattatgacagtagtggagtcttgttcattgagtctctgccacaatgtgatagccattcctccagggaggcagagtcatttcagtcgtctctgggtggcattaagtttctccccatgaccaatatattgtaaatagcacaagggatgatatttctggaagtaggatcccatggtaatctgacaaataactgctgtgggatcagggtcagctcagaatacatgaggatgatggcagccacagcccttgttttgcctttatagactatggaggcagataaatatcgcagatatggtacagtttagtttcgcctgattctttgtcactgtagatcattgaggagttaaaaaaaaaaaagtatgactggtccccacagaggtaagaatctcattgaaactacaattcacacacttgacaaagttagtaagaaaaagcaatagtagccatgcttaattttgtgaatctgagccagtaaaagtaaggtatagtttgtgattattttaaaacctacttcagaatgctacatcctgtgtgactgataggactttctactgcacactctgaataaaatcaggcctctgaaaatagtgtgcgagcaaaaaacatttcagccacctagagtctttttttctttttgtttttctttttttttttttgagatggagtttgctttgtcacgcaggctggagtgcagtggcgcaatctcggctcactgcaagctctgcctcctgggttcacaccattctcctgcctcagcctcccaagtagctgggactataggtgcccgccaccagcctggctaattttttgtatattttgtagagacagggtttcaccatgttagccaggatggtctcgatctcctgacctcatgatccacctgcctcgtcctcccaaagtgctgggattacaggcatgagccactacttccggcccagccacccagattctttctttgctgccaattgcccacatgatacctgacattgtgttggatatttgagaagggtaggaatggagcacgttatttaaaggaggggtcatacagcaaaactcatttttggtaagaaaaggagtaactctaaagggaaagggaattccatttcctgccccaaccctactctagaaaataggatttaccatatcatttttcccccttctcacagtaattggctgaagaatcctcttccatttggaagtctggcgtaaatgaatctccttatccttaacatccctcagagccactgattaccttcatcaaaccttcttgatctctacttgtgaatcagcagtgatagtgttaagattctcaaaagcatcaaactttttcttgttttaaaagagcaaactaggccaggcgcggtggctcacacctgtaatcccagcactttgggaggccgaggcggtcagatcacctgaggttgggagtttgagaccacccagaccaacatggagaaaccccaaactacaaatacaaaattagctggctgtcgtggcacatgcctgtaatcccagctacttgggaggctgaggcaggagaatcgcttgaacctgggacgcagaggttgcggtgagccggagattgcgccattgaactccaccctgggcaacaagagcaaaactctgtctcaaaaaaaaaagaagagcaaactaggccgggtgtaatggttcatgcctctaaccccagcactttaggaggctgagatgggaggattgattgagccgaggggttcaagactaccttgggcaacatagtaaaaccccatctctacaaaaaatttttaaaaattagttgggcttggcatgcatactacttgggaggctgaggtaggaggatcacctgaccccaaggaggttgaggctgcagtgagctgtgatcccattgcactccagcctgggagacagagtgagaccatcccccaaaaaataaaaataggccaggtgcggtggctcatgcctgtaatctcaggactttgggaggccaaggcgggcagatcacttgaggccaggagttcaagacaagcctggccaacatggcgaaaccctgtttctactaaaaatacaaaaattagctggcctggtaccgcgtgcctatactcccagctactcgggaggctgtggcaggagaatcgcttgaaccctggaggtgggggttgcagtgagtgccactgcaccccagcctgggggacagagtgagaccctgtctcaaaaaaataaaaaacaatgagggtgagcacttcttttgacttgagtcattttcatttttgagcacacattacctgagtttatacgttccagccaagccagcaaagtagcagagactcagtgaattggtatctattttttgtggatgggttttcaggctttgtgggtacaaatacaggaggctaaacagcaatgagaagcaaagattcccttccttttttttttttttttttttttttttttgggacagagtcttgctctgtcaccaggctggagtgcagtggcatgatctcggttcactgaagtctctgcctcctgggttcaagggattcctctgcctcagcctcccatcaaagattcccttctactagcaccttgcattaaaggcagagtagtccaacctccttacatgaaaggctgcatcaatctgatcttcatagcaataataatagctaataacattgagttatgactaagtgtcaggtgccatactaaaatttctacatgcattatttcatctccttaactttgaagtgggtaatgtgattattcccattttttaggtaagggattgagcacagagatgtcagataatttacccaaggtcacatggctaataagcattgaagtcaaaattttgaaccaggcactctgacttcattgcctttaaggttaccatgtgattagtagagtaggttagacatgtacactgagtaatgaggtgctgacttccctcaatgggggaacaggaatagggctgtgggaggccagaggcaggatagatcactgctatctggtacatcagggaaggcttttggaaaagatggaactacctaaaggcacataatagagaaagcaaatgtttttctgctggtgctgaggaagaagtgcatggtaaacccagagtgtgctcattgatggaaaaccctgctagacagattactaagattttccttgcttggagggcattgctgggaggttgagaaagaaaggaatagaatggggtgtaaaggcaatatctgaaagcaaagcactgtgccctctaaaactcagtgaggaagtcctttggagaagaatgcatccttaatagatgttcaagacatatttgaagattgctttttttaaaaaagtggcaacaaggtggatggagatgttttaaaatgaaaacggtctcttccacatgagaggaagagacttattttgctaacctggttgtaactggatgaaatatgaacaaggaagggtgaacttagttctattaatccaaacagattatttcaccatgtggagtagaaataaaaatagaccaagtgtcttatgtcccaaacaaaccaagttgtatctgtgccagctttgtctccataccatgtagggtgagaatcctgctgggcacagggacactttagcctaaatagggcatagagaattcttgtagactcctagcttctctctgtggcagctcccacatttcatttctatcctttatatttttttgcagagctggaggtaaatgctgccatagtctctggacaaaggtaagatgatcatttctgcagacgtagcatgaacacagcataagcctctttgaaaggtatcagctgtctcagtctttaaacctctcttcaccttgtccttttccttcactcttgcaccagtctgtttttactgctaacgtagagagctgtcatgagtcctaatccctcagaggtaacatttctcttaataaaagctggaggccaagtttctaccttttatggttgttttcaaagctgagtgagataacatgttctgcataatgaggaaatagtaaatgttcaatatatgggagctgttgttaccattgatattaatattaataatagtccttgcagctgtcttctaaagaacagttgtttgaccctgaaagcaaaagaaggagaaagccaggcaggatctgacccaaaacctatgcttttttctgttacactgtgctgctccacataaccctacaaaatgacatacatctatggcttcaacttcattagctctgtggagaggaatattaccattttccaaaagtcatgcctttttttggagacagagtcttgctctatcacccaggctggtgtgcagttgcacgatctcggcacactgcaacctccacctctggggttgatgcaattctcctgcctcagcctcacaagtagctgggattacaggtatgtaccaccacacctagctaatttttgtatttttagtagagacggggtttcaccacattggccaggctggtcttgaactcctgacctcaagtgatccacccgtctcagcctctgggattacaggtgtgagccaccacacacagtcttgtctcttttagtgtaggaatgcactggataatattttaaagaacttctcataattgtacagcaacttcataagacactttcacaatatttttttcatttaatcttcatatcatccctgtgaggaggttaatagccaccatttatttgaatgttgttccatgccatgcatccttaatagattgagctacaagtgccctagatgtgttatctcatctaattttcacagtatctattaggaaagtaaattctgtcttatagatgagaaatctaaagttcagaaaggttaactaaattgcccaaggtcacagaattagtaaatggtgaaggttagattcaaacccaagccttctgacttcagagccctgatatttaacctatgtattgcaacagacaagatgggatttatagatcaagaatctagaatgaggctgggtgcagtggctcacgcctgtaatcccagcactttgggaggccgaggcaggcagatcatttgaggtcaggagttcgataccaccctggccaaaatggtaagaccccgtctctactaaaactacaaaaattagccaggcatggtggcgcatgcctataatcccagctacttgggaggctgaggcaggagagtcacttaaacctgggaggcggaggttgcagtgagccgagatcatgccactgcaccccagcctgggcgacagagtgaaattctgtctaaaagaaaagaaaagaaaaaagagtctagaacggccgggctcagtggctcacacctgtactcccaacactctgggaggccgaggtaggcagatggcttgagcccaggtgtttgagaccagcctgggtaacatagtgaaaccctgtctatacaaaaaattagctgggcatagtggtatgtgcctgtagtcccagctacttaggaggctgaggtgggaggatcacctgagcccagggaggtcgaggttgcagtgagccatggtcgtgctcactgcactccaacatgagcaacagagtaagactctatcttaaaaaaaaaaaaaaaaaagtctagaacatagagcattaaatagcatagtcaataaatgcatagctaagacttcacccctgttcatctcattccaaattcattgctactcctactataccactctgcctgtctgattttatttggattgggctaatgtttgaattcatctgcatttctcaagcatgcaccagctatttgtctagagaaagaagctaatcagaccaaaaatacatttggggtgtttgtttccagagatacctgagcattgaccataaaaaacaggatagtcttgctgtggcttttgttttgccaggagaaagaggcactttcattaggaatcatctagccaggtacagtggctcatgcctgtaaccccagcattttgggagaccaaggagggaggattgcttgagcttaggagttgcccagcctgggcaacatagggagaccctgtctctatgaaaaaaaaataaaaaataaaaaattaataaaaaattagctggtcatggtggcacttgcctgtagtcccagctactcaggaggctaaggtgggaggatcacttgagcctgggaggtcagggctgcaatgagccatgattgcactacccacaccccagcctgggggacagagtgacatcctgtctcaaaaaaaaaacaaaaattttttttaaaaaaagaactttctttcctcagaagctttgaccattttctgagctcctagccagaaagccatcttcaccacctctcaaaggaggtataaatccccctgacttgtaattccaccccagctccagcctcacctctccttgacttaccttggcttatggttgggtgtcgggcggctgttatacataaagctatgggagtgaatggtgtgtcccagttcccaaccacggtgctactagcaaagggtcctctggcaggagtgaacagtggaagggtagggatagttgacagtcaggttatggtctgtgtccttaagaggttcacagtctagttgaagacacaaaacattaaaatagaacacgatgtacaatctgatgggtgctctagaatgccagataaagactgtgaacccaagagacaaaagagacagctctacttgggaaatgagatcatggaagacttcccagaagaggcagccttttgaccagtattgttttgttttgttttgttttgttttgttttgttttgttgcattatttttatttgttacatgtcttgcaagcaaatttaattttctaaagaattttttttctgatcattttaacatgcgtttttgaaccatgaaagtgtaaaaaattattaaagaaaaccagaaattcagatcagagaattacaaagaagaaaataactcaccagtaaactagtattcctacaactcaacaatattcactgtacatatattttagttcatctgcttctagtctttttcacacagtgtgcacccaaatatattgtgtcagatttatgtgtatagggctgggcgttgtggctcacacctgtaatcccagcactttgggaggccaaggcaggtggatcatttgaggtcaggagttcgagaccagcctggccaacatggtgaaaccccatctttactaaaaatacaaaaattagccaggcgtggtggcgcatgcctgtaatcccagctactcaggaggctgagacaggagaattgcttgaacacaggaggcagagtttgcactttgctgagatcctgccactgcactccagcctggggcacagagcaagactccatctcaaaaacaaacaacaacaacaaaagatttatgtgtatatagctcatatttattcatatgtagttacatatatactcaacacatacaacaatgaaaatggaattatactgttcattgtgttggtaagtttttcccacttggtaatgtgtcataaatcgttttgtcattaaataatctacaacatgatttttcatgactccatatggatgtgccatgatttagctaactaatctactatcgttaggtatttaggtcttctgttttcactagtacaaataaaatgttttaacttccttatgtgtggagctctgtaaaaagatttgtttccttaggcacctagaagtgggattgctgagtcaagggttacaccagagtttctcagcctcaacattattgacctttggggccagataactgtttgttgtgtggggcttacgtttagtggcatccctggcctgtacccaaaagattccggtagcacccctctccccaagttgtgacaatcaaaaatgtctccagatgttgctaaatgtcccctaagaagcaaaattgcctccttttaagaaccactgggttatacaatttacactccagttaggagtgtatgtaaatgtttttgttcctgtatcctcaataacagtgaatattaccaattttaaatcttcatatactaagaaaagggggttggggtgtggacaatcaatatacctagcagtgtattgtgaattatccccatactgtggcttctaatatgctgttatctgactctaccgggatcattagtaaatgccaatatatgttaataatttcctaggtttatatactattttgagttaatagcaattttcagacatcttaaagaccattttcatgattctaaaaaattacaaaatccaaaatgttttaatttttgaagggaactattaccttaggaaaatgggtgaggggcctggtgcaatggctcacgcctgtaatcccagcactttgggaggccgaggtgggtggatcacttgaggtcaggagtttaagaccatcctggccagtgtggtgaaacccccatctctactaaaaagacaaaaattagcagggcgtggtgtcacatggctgtagtcccagctactcgggaggctgaggcaggtgaattgcctgaacccaggaggcaggggtcgcagtgagctgagacagcgccactgcactccagcctgggcgacagagtgacactctgtctggaaaaaaaaaaaaaagaaaagaaaagaaaatgggtgaggaattaggggagttttgttccaatttttttatgtcttttaccagtttttctacaatttcaccaacattatgctttactattttatttttactaatgtaataagctagactcacttttaaacccccagtaacatagaaggcaatagtgcttattaccccaggttgaactgctttctctccagaataactatatagttcttagtctcctactttacgaatgaaactatctgaagagcccgttttttgtgtggcctggttccctcacctgcttggaaactttttgcttccctctgtcagcagtgagcccaaagagatagttgaaaagtccaaaatcccaggccgaagaaactcccgaactgaagagccaactgtggcctctgaaagtgtggaaaatggacatcgtaaacgatcttctcgacctgcttcagcctccagctctactaaaggttagcagtgggatgtgggtgctatttgtgggtcaaatagaggaatagagttcttaccacagcagtagaagactttgtccttcatcattgcttctgttcctgaagtctgtcaagtgtctttgtcttctactacctgtttggtccttcctttatttgttcatttaactgtatgttttctgtgtgtgtactcaagagcaacaagcactgctggaaaaaagaacataacagggcagatttattccactggtttttgggttttgggtttttttgttgttgttgttggtttttgtttgtttgtttttttgaaacagggtctcactttattgcctgggctggagtgcagtggcacaatcacagctcactgcagccttgaattcctgggctcaagtaattctcctgcctcagccttccaaagctggaattgcaggcatgagccaccacacctggccttgagtccactttttttttttttttgagatggagtctcattctgttgcccaggctggagtgcagtggcgtgatctcagcttactgtaacctccgcctcccaggttcaagtgattctcctgcctcagcgtcctgagtagctgggattacaggtgcgtgccacctcacctggctaatgtttctatttttagtagagacagggattcatcatgttggccaggctggtctcgaactcctaacctcaagtgatctgcccatctcagcttcctaaagtgctgggattacaggctgagccaccacgcccagctgattccactttaaattcatgatcacccacttcagataggtcctgaatatggcccagctatctttccatgtttccatggtcaactatctttcccactctattctttttaaacctctggtccacactttctccccctctctcttggtagagaccctgacctcttcacagagaaaatagaattccctcagcttcccactaccaagaaataaatctaccagtatcctcctttgtgctttctataatagagcagctgtccttcctcaagtctaaggccagtttctccatctatgcctttgatcccatctcctctgaccttcttaagaaccttaccctgtgagtgttctctgttgactactatctcctttttaaattaacttttcccttgggttctgtgaccaagaactctctgttgtcttctgctaccacctctccagctgctcctcctcagtctcccttcccagccattagatggtgaccttcctcagactttgatcctgagtcaccttttctcttcaaattcgtattttctccctaatggatctcagtcatgcccctcttctttagtaacagcctttcacagatgacttgtaaatttgtatttctatttctagtacagacccctagagatcttagacaactgcatgcacatccttactggaacctcagactcaacatatctaaaaccaaacttgtgatttttcacctccaacagtgaggtcctctgccattgtaccccatctcaataaatggcaccaccatctatccattagacaagtcctccttgatacctctctccctcacccttatatcaaactcgtcacaaaaaactgcccattttatctcaggtggcccttttccatcttcactactacccactagcttaaaacccttcaatgatttaccattgtaattaggattaaagtccaaaagcttcaacctaccccacaagcttctgtgtggtctcggccctgtcatctcccagcctcatcccacttcccttagcaagtcggacatgccgtcctcattcctctgatcacaagcctgtgcatatgttgcagctactgcagggagtgctcttctctctgcccacctctcttctccttaacgtcccacccttcctacttatcttagctcagttgtcactgctatggggaatcacagcaccaggttcttcttcataataccacagctataactatgccagtttgtgacataggtaattagtatgtatacttggttagggcaggagattatgtctgattttgcgaactactgtatctctggtgcctagtatggtgccaaatacagagatgtaccaatcagtaattatcaaatgaataaccatctatcaaatatgtattaaatatttactacatgtcaggccctgaggttataatagtgaaaagacagagcctcagccacgtgcagtggctcacgcctgtaatcccagcactttgggaggccgaggcaggtaaatcacctgaggtcaggagttcgagaccagcctgaccaacatggtgaaaccccctctctacttaaaatacaaaaattagctgggtgtggtggtgggcgcctgtaatcccagctattcaggagactgaggcaggagaattgcttgaatccaggaggcggaggttgcagtgagccaagatcgcgtcattgtgttccagcctgggcaacagagtgagactccatctcaaaaaaaaaaaaaaagtctctgtctttaccacattgaaagacgaattctaatactctgtgttaaatgttaaatgctatgatagcaaaattacatggcactataagagcatatagctgagataccttgctcttctgccaggtcagagaaggctttctagaaaaaaatgacatgacatttaagctgagacctgaagaatgaggaggcagtgaccagatcattctcttaggaaatgtgctgagcttgagtagttcagtttgggtaaggtaagagctgggatcctggctgagttcctgattatcagcaggactgctgagaaacggtcaagtatcattgggatgccagcctaaagaccaggcagattctggtgcacccacactagacactagacacggatctgaggactcagctgctgttggcaggttatgtctctaggcaagaatgtcacgatgcctcacaagagcctctgggaataggccagaggtcatatacagttaaaattgaggtgtacaaagtaccatcaccatactcagcctgctggagagttaaggggcaaaggtgagagaggccttctttcttttccaggaatagtgtatacaccacagtcagggtctcttaggtatcctcattttaggtggagatatgaagccaataacttcattcctcctctctgggaatcatctctaggcagaaactagtttggaagggagtacacttttcagtatattgaagtactacacttaaagcataaaagggaacatgcctagagttctatgggaaaatctgcttcccctcagttctgcatgttcttgtagcctttcactttcccaaaagagtaagatcttctaggctatagaatatggtatgtaattacctttaaagcggggaaaaggtattggcctttagagatgtcacacaccagatttttggaaccttgacctcagcccagagcctcaaggtactaaagggttatttacagggcaccagaaagaatctaagaagcaactgggacagttaagaagagatgctcaaactagaaccgctctgtagagaactaccagccaagaagagatggaaagctagaacctgtttttaaggggtgttggggatggggaataagcctgtacacttaaactgaacattgtcccaccgtggcagtggtgatgttggaaagcctggcacatccttgctctgaggcttagcagttggcttagaagaggccataatgactctcaggctttgtgatcttgcatggaggggtgctaagtgtctccctaaagaatggcatagctctggcctgtccctggaatcacagtcatgtatagatatccgcatcagtcgcaagacctcaggccatcattctctaactgtctctggttaagttactgtgtatgagtagaaaaacagactcagtttctcctgctatactctcacaacacgcttctgacacaagatgtaaggtgtttttttccccacacatcaagcaagtcatcagttctgcctcagacaccagctgggtgtcctccaattcaattctgacactatctgcctggagatagtatcagatccacaggtttgagggctcagtcccacaagactgctgcccacttccaatgccaggtgcaagccccaggttgttttacctgtgcttctgactagctggctaaaaattggagtttccatgaacccctcgtaaccaggtccagttaatttgctagagtggctcatagaactcagggaaacatgtttaccagtttattatacagctttttctttcgttttttcttgctttgttttgttttgtgacaaagtctcactctgtcgcccaggccagagtgcagtggcacaatctcggctcactgcaacctccacctcccaggttcaagcaattcttatgcctcaacatcccaggttgctggcattacagaggcttgcaccaccattcctggctaatttgtgtgtgtgggtgtgtgtgtattttttttagtagagatggggtttcaccatgttggccaggctggtctcgaagtcctgacctcaagtgattcacttgcctcggcctcccaaagtgctggaattactggtgtgagccactgtgcttggcatttttttttttttttttttcatttgagacaggttcttactgtgtcacccaggctagagtacagtggcatgatcatggctcactgtaaccttgaactcctgagtttaaatgatccttctgcctcagcttcccaagtagctggaactacaggtgtgcatcaccatgcctggctaattttttaatttttttgtagagatggggtctccctgtgtgcccaggctgatcttgagctcctagcctcaagtgatcctcccacattggcctcccatatgaaagtttttttttaatttttacttttattttatttatttatttatttatttttagacggagtctcactccatcgcccaggctggagtgcaatggtgtgatcttggctcgttgcaacctccgcctcccaggttcaagcaattcttgtgcctcagcctcccaagtagctgggattacaggcgcgtaccaccacacccagctaatttttatatttttagtagagatagggtttcaccatgttggccaggctggtctcgaactcctaacctcaaatgatccacctgcctcggcctcccaaagtgctgggattacaggcatgagccaccatgcccagccggctttttcttttgctttttttttttttttttttttttttttttgagacagggtctcactgtgtcacccaggctagagtgcaatggcactatcatcactcactgcagcctcaaactcttgggctcaagcaagcctcctgccttagcctcctgagtaattgagactgcaggcacatatgaccatggctagctaaattctttattttttgtagaaacaggactcaccatgttgcccaggctggtctagaactcctgggctcaagtgatcctcccaccttcgcctcccaaagtgctgggattacaggcgtgagccactatgccctgatattttaaagcagtggtccccaatccccgggccatggactggttggtagtggtctgtggcctgttaggaactgggccgcacagcaggaggtgagtggtgggcaagcgagcattactgcctgagctccatctcctgtcaaatcagaggtgacattagattctcataggagtgtgaaccctactgtaaactgtgcatgcgagagatctaggttgtgtagtccttataagaatctaactaatgcctgataatctgaggtggaacagtttcatcctgaaactgtctcccccgcaacccccagtccatgccaaaaaggttggggaccacttttaaaggatagaaatgaacagccagatgaagagatacatagggcaaggtctggatggatcccaagtgtagaagcttccatccctgtggagttggtgcaccaccctcttagcaggtagatgtgttctcgttcaccttctgggaagcccctgaattcagtccttttgtgggttttgcgggttgtttttttttttttttttttttttttttttgtatagaggaagaaggggaaggggagataggtcccttttgggtttttagtggggcttcattacataggcatgattgataaaagagttggccatttgtgatcaactcaacctcagagctgtttcaggaaccatgggcaaaaggccaaatattttaacaaaagatggctcacttaggaaattacaagagttataggagctgtgagccaggaacgtgggacaaaaaccaaaaaatatatattgtagtatcacagttaccttttaaatcagaaatgagtactgtagctcttttggtttttcagtattaaagctcttggagccaaattaaagaataattatgcatatttttggcctgtatattgtatccaaaaatgtgaaccaagttataaaataatttactgtgattgtatttaaacccatacccagaatgtgatcaccaaatatcaagctggtttctaaaatggatgcacctcaaatgtggggacatatgcagtgctgggtacctgaaatatgagtgaagtatcttcctgcagaatcagcactgtgtaaagttttgagggggaaagagggcttctttttgcatttaataagagtttggtcatatatatcatatgcaaacaaaatcagagacattctgtgtttttcatgaaaatctctgaagctgagaaacactatgagcagtttgtaattaaaagtgttgctgtttgtattgttggagaaccagtgacattaatcatgctcctgctgcgagagccgagtttgcttacatcatgctggccaaggcctgccagactgccagatcagagcaggtgggatggatgatttctgggcaagtccaggaaggcccacatggtttttggtcattctttggtccattgtttttgttggttgggtcacttataattacacaaaaattagctaccacaaatcactttttaaaattgcacctgatcagatgtgttgtttacaaacatgcaaatgagtagttttccttcctgacatgatgaatttgccacaaaaacacaaatgatttttctagcttgctttatcattatttactcctccatttagaatagttgttgttatattttcaactgggaaaaaggtaattatttttttaaaaggtagttaaaaatatgaagttcaaagctttaagtttggaaccaggaaaatatgttaatttaaggaaagttcagagcaatctgtaattatcagcagccctgggtgtccctctgacaacaaagtaggtgatagccccaccctacccacagccagtgaagaaactgtctaaaaaaacacagggtataaagatatactgaattaaaacagaagtattactgtagatatgcaagtgaacatacatttataatgtcgtgggagaaaaccctgaagagtaaccacctgaaactgtagtagcttcattttgaaaccaaccatgcaaattgtgaaggaaaatttccagaatgtttttgtttgttttgagacagagtcttgctctgtcacccaggctggagagctccctccaaaatgttaccacttttactactctaatgaataggcaaatcacctttttttttttttgagatggagtcttgcaaattacttttttttttgagacagtctcggattgtcgcccaggctggagtgcagtggtgcgatctgaactcactgcaacctctgcctcctgggttcaagtgattctcctggctcagcctcccgaatagctgggactacaggcatgcaccaccactcccggctaatttttgtatttttagaagagatggggtttcgccttgttggccaggctggtcttgaactcctgacctcaagtgatctgccgacctctgctaatcaaagttctgggattacaggtgtgagccaccgcatctcgccgatttccagaattttttacaattacttagacgtctcggatagaaatagtacagtgaaaggcacaatgatgtgagcaaggtcaaagtccatttctaaagctccttggatggtagaggtcacatactagaggattaagtagagccttgtactgtagatttggtcaaatttgcttaaggtcaaaatgaggcaaccaggctgaaaaacaaatccctttattaggttataaatttaaatgttcccccagtgacatagttggacagtcacttaaaagactattattgacccagttctttaccacccagttggttctaagacatggatataaatgatttgactacactgctagagtttgaactatttgtctatctgttaagagacactaattttgtaaaatccctgatagttaaaaaactgaaggtaggttcacagtcaggccaggcagcctttaggaacagcgtgccaatcacagtctgaggtacaccctgactggatcattagcctctacatcacttacctagaatttcttaccttaaagtaatttgtggccaggctcagtggctcacttctgtaatcctaacgttctgggaggctgaggcgggcagatcagttgaggtgaggaatttgagatcagcctggccaacatggccaaaccccatctctactaaaaatacaaccattagctgggcgtggtggtgcatgcctgtaatcccagctactagggaggctgaggcaggagaattgcttgaacccagggggtggaggttgcagtgagttcagatcgcaccactgcactccagcctgggcgacaatccgagactgtctcaaaaaaaaaagtaatttgcaagactccatctcaaaaaaaaaaaaaggtgatttgcctattcattagagtagtaaaagtggtaacattttggagggagtagaaaatcaactaccaaaacaaaaaaactcatcaaaagatgtttttttcagacagatttttttcagacatgatggggaacagtggcaaaggacctcactgttggaggtgaaaatcccaagtttggttttagacatgttgagtctgaggtttgctctatgtctcagattgactggatttatccagggaaggtgatagagacttcaaactcagtttaaaatttatttttttcctcatggaagtatgaaagtttacatccttctccccaccaaccacagtatccaaaagatgagggtttttaatggtgtgtttgtgggtttttttgcagtttctagcacaagtcatttgtttattcctgaccccactcattgattcacgctcagaggcaacctaccagttcattgggtgcttcggagcagtgacaaatgggaacaagcaaggaaggagggggagcctgaggttgcttctcccccacaccccactacccacttcttttcccagccacatatgtttctcagacataccacttgatccttcatatcacaacaagggaaaagcttccaaagttgacctagttaatgaatgttttgctgaggatgaacactgtcaagacaaaaaccctgcctatttttactgcaaatgacaaatttgctgcagtgaaaataacgcttgagatttggacctgaagagttgattttagggagttatgtgggctgtgtgagactctttaatttacatgaattaaaataaagaacaccattattaacatcctggcagattaactgtcttctgattagtaaaagactaatgagtaaatcagaaagactgattctaccacatggcacaaaaaaaaacatgacctttgagaagacaaacatactgaaatttccaccaacagaggcttgaatgaaattactgtactgggcacctcttggaaattcatctagaccgcacttctttttatttttttattttttttgagacggagtctcaatcttgttgcccaagctggagtgcaatggcgcaatctcggctcaccacaacctccacctcccaggctcaagcaattctcctgccttagcctcccgagtaactgggattacaggcatgcaccaccacacctggctaattttctttatttagtagagatggggtttctccacgttggtcaggctgctcttgaactcttgacctcaggtgatccacccgcctcagactcccaaagtgctgggattacaagcatgagccaccacgcctggcctaggcctcacttcttagcagtcaccttagctaacagagtagtgaaatttttccttacaatctacatatttattagagtctgggttcacaaaatattatgatacaaaagacaaaggaaaatttgccttgaatacaacctaacatgcagtatcagaaaattcagcctagttaccagaaatgggtaaatctgattcatcttttgtattgatatattagaagcattttttttctccttgatgagaagtaattttagaacattattttcatattaaaaccagaatatgaaataaaggtgaccttttgaagtcaatatgagattctaaagaagtgtttacctttggagagcttcaggctattcactgtactctgccataactttgtgtagaattttttttttttttttaaatagagatggggtctctgtcacccaggctggagtacagtggcatgaacatagctcacttcagccttgaactccttcagccatgaactcctgggctcaagtgatcctcccacttggtctcctgagtagctgggactacaggcatgtgccaccacacccagctaattcttttctttttgtagagatgggttctcaccatcttgcccaggctggcctcaaaacttctgggctcaagtgagcttcctgcgtcagtcttccaaagtgttgggattacaggggtgagccatcacacctggccaaaacgtttttaagaaacacagtttaagtctggcataagattaagttaaaacactgatagtacaagagaaactaaaggaatcaaaacatagtcatttccctgtatgtcactgtcattctgtgtgtaaatcactcagttcccacctcctccatgaagccttcaggctcacttgggctcagagcaggccgttgcttattctgaattgcattcatgactgtatgtatccacagtctttttttttttttttttttttgagacggagtctcgctgtctccaggctacagtacagtggtgggatatcggcttactggaaccttcacctccgtagttcaagcaattcccctgcctcagcctcctgagtagctgggattaaggcacacgccaccacgcccggctagtttttcgtgtatttttagtagagatggggtttcgccatgttggccaaactagtctcaaactcctcacctcaggcaatccgcccacctcggcctcccaaaatgctgggattacaggcgtgagccaccacgcccagccttccacaatcttgatataactggctgggccatagtagaccctcactgaccaaggcccatggtcatgttgtttagaccttgactatagcatgacaaaaatggttccttactgtgaaacaatagcttggctccaaaagggatcccaaggcaggtttttttttgcattctaacagaatttactcatttgcttatggcattactcgttgatttctcaccaaaagcattgtcagtctgtctattacacttcgttttatgatgagaactggtgagggaaacagtgggtgaattgcccagctacaaaggctctctccaccctgcactttctctagtcagtgtgcttcatcgccaccacctctgtcacattccaattctgcccaatgcaggaccacaccctcttcccacgtaagtcatcaagcaaagcctgtgactctctccattcagagcaccccttagacagattctgagttgagtagggctccccttaggtctgccctgcttgttgtggactgtctaaagggcactgctgtaaagagttacttccactgaacatgtcctttctttcccccacagacataaccagtgcggtgcaatccaagcgaagaaaatccaagtaaacaagcaggactgcgacttgatacttggaaatgtgtgtgacttttacaaagagcaattttgagctgtgacttttttaaatcaatttctgtacagttagtaattttaataatgtggcccttttcctagtccctgcaacctgtttcataaagtgcaatggggaaagcaggactgttgagcccttttggtgttgcgagttgaagttcaaggtttctaaaatgttgtcttgtattgaaaggagctaatgccattataaatgttactagttttcacatttcctaagcagcctagagtacagggtgagcatttttagatctcctaatgatgtattgtgccgtggaagtactgtgtgtgaatagcagtagtgggggcaaaagcaatcttctcatttggaaatgttgtaaataattttattatatagtgttttggatgtatttgttgtagaaatggaccagtgaataaagagaatctaaggatttgtacaatgtgaaataacgtgttaaataaatgtcattgtcatagaacataaagttatgttattggtaaggga

SEQ ID NO: 1998 - DNA, 27681 bp, Homo sapiens; identical to SEQ ID NO: 1997

SEQ ID NO: 1999 - DNA, 3977 bp, Homo sapiens
tcatgtgctttaaatatatttttatttgtttttctttatattaatttttttctcccatagaggaatagcattacagtctaacaatcagaattctgttacacacatacacaggcatgccacatgacccagttgaggtggttgtctccttgagtctgttgacacgtcacatggtcaaagtctcctcatttcagccagtctcaacacaaaacacccaacagggatgcactcaacttgttggttccatgtggaactaggtggcagggcgagagggaaagtagtagaagggggctatggtgtgtctgcattcagtcccctcacataaagccacatggatctaggggggtatccaagagctctggtggggtccgtgttgcacctaagacattataggtcagagcaagttgctcagagggttccaggcagggggctggggagcaggcatactctaaaacagcaccaaactgcattcatacacggtgccctgctggggctagactggcaaaggctggaaagacacccagcttgaaggaaccactcagacttactggggaataactggaagtcactgtttgatgtaactgggactcactctagaaacgggtccctctgacagttttggcaaagtgctggtagtactgacattaatactcacaaattgatacaaactcctctagggcctcagaaaacatcaatcaaaacagactctctaaccccctcctaaggttgcataggactttgaactctggttccctcatgtattcaagttctgtggtttaaaaaaaaatcctgaagcatgctcaaggtgaaaggcacgtacacagtcaatacagtatgacaagggctgatgcttcaggagtcagactagcaggagactgagtagtgttggttcttagaaatctatacacaattaaaatattgccacactcaaatgctacagaatctataggaaaggtacaaaaaaatatgagccttgcaaccaagcaggtgagagattgggttctagaatacaggagcctccagaaatataggtaaacaaaaggccttttaaaatttgagccaaatgccctataacttaaactcttcccccaccagaaggatcatgggcaccacacaggactgagcctaggtcccagctggcagtgaggagtaggcaagaagggttggagggagattcagctcttggaggtgccgaagaccctaggctggctgtgaagtgcccaagtggtagctggaagaataaaagcaactaggttctgaaggagaacttgggagaggagcaaggctgtcaactactggggccctagtggactggcgtgggagctttgatccgtttttagtgttaatttggcttattccctggaataggagaccccatcaggtcttcctctgtcctcatcccagcatccatggggataccccatcccttccccacataccccccatgaggcctggggctatagggtcagggagggcagctgcctttgccctcatgggaatgcagagttttctccaagcttcagcttggctgtgaggcctggaaacctagagttggggtgaggggaggacctatgttcataggtaccaagaagtcttaaaagttcctaggaagagtgagcacacactagaaaaggacggctagaaagaggaaatgggaagcaactcagggcatcccaagaggctgttgctggtgtctgagcccaaaattcagtctcaccacaagaaggggaggctggtggcccctgccccttctgtctcccccagggattcaggttccctcttccaggtatttactggaggagaaggggagggggatcatagggtacccatttctccccagcaacctagaaagaaagagaggcctgtgggagaaaatgaaaagaggccccctgaaggccctgaacctggataggaacaatttgcagattgagacagtgggagtcctggactcctactcaggactgctggctagccatactgagcagggtgtgaaatacaaggccagaggcaaggtgaagactgagctgtcagccttgggatggcttcaccccatggtgtgtcctccagcatcactgctctgcacgctgacctagggtgtgtgccctttccctgcctagaagccctgtggcctgcatgtctcctaagctagttctagcaccttgggcttgtgaacagacggccaggatggtagggccttgcccagcttctactcgggtgacgtgttgggggtagagtggcaaggtactaactaagcccttcagatttcagggcctgcagaagggtggattatagaaaagggaagtgggggcagactccaggcttcagcctgggagcagggtttggcctctctgagcaagcacagtgcacactcccttggtgccctgctccctgcagcttctcaacgtgtctgtcctgtccgcatctccaataggctgcctcgttccctagattccctccatcttctccctctaactcacgtctcacagtcctcttctacatactgtacctttccaggcctaagcagctccacagagtaccgcccccaaggcagaaggaaggggagactaaaagcaaaaccctgagcccttactggagggcaatgacagcagcccaggctgcacaggctctacctggtcagagctgggctcagggtccccaccatttggtagggaattactgggaatgaagaataagggaacaggagtgagtgtaatgccaaccatgggatagtgtgagacatgtaaggtgggagttgaaggtggggaatgagccagatcagggactggaagaagctttcagaaataggggcaggccagaggtagaggactggagggcaagggtgaaagggagagacagggatggggaccagagaagaaaggatggaggggccaggagtagggggcatggatgattagatgctgggtatggggaccaggagtgagggtgaagggtgaatgggttcagaggcagattagaggatcagagatggggaaattgagggtgtcggggaaggaacggctatcacccaacctcacacgctttaagaagggaggtttcggtgtccagcccgaggagtcggaggagcccgacagggatcgggatcggcaaggggttcgtggcgcggccggtggacgctcagtagttgaactggcgctggcacggctggtagatgaagctgctctggttcttggaccggcgcggacggctctcgcgggctcggttctgccgctgcaccgccttggcgctcagcgcgtggcgctctgcccgctgccgggcccgctgcagccgccgcacctggcccgccttctccagcagcgccgcccgcgctgggagaggagcggcgtggcgcgcggcccgcggctcgcggcgggcgggcgtcaattccctgtgaggacagagccaggctcggtcaagccgggtaagctgggcggggggtctagagggcgctgccatctcccacccttgcttcggctcagttctgtgtctgttcagattggggtgcccgacgcccttcttgtgggtaccaacccggaggtgcctcctcggttctagcccttaacaggtaaactggacctcgggggagactggacccccaccccctattccacccttgcctttctgtttaagtcccactccctaggcgctccagccacgctcctcaagcctccaaccccggccccagcctcttggccacgcccctccctctcaagccccgcccctccgtcctcaggcccgcttctagcctcgcccggaggcccaccggccccccactttgtctcaaaggcaaccctcccaaggccgctaccccctcgagcgcggggcgggctcctggccccactaccccagcctcctagcctggaccctggcctccaagatccgtctccctgggcctccaggctccgcccccggcccgctcacccttcgctgaggtcgccgtcaggcagggccgcgtccgggagcggggaaggggacccgggctc

SEQ ID NO: 2000 - DNA, 498 bp, Homo sapiens
tctcagcagcagcagcagcagcagcaacaaatgatgatgatgctcatgatgcagcaggatcccaaatcagttaggcttccagtctctcaaaatgtccatcctccaaggggccccctgaaccccgactcccagagaatgcccatgcaacagagtggcagtgtgcctgtcatggtcagtctgcaaggacctgcctccgtgccaccatcacctgataaacaaagaatgccaatgcctgtgaatactcccttgggaagcaattcaaggaaaatggtctatcaggagagcccgcagaatccttccagctcgccactggcggagatggcctcactccctgaagcaagtggcagtgaagcaccatctgtcccaggaggcccaaacaacatgccttcacatgtagtacttccccagaatcagttaatgatgacagggccaaaacctggaccatcgcccctttcagcaactcaaggtgcaactccccagcaaccccctgtaaattcc

SEQ ID NO: 2001 - DNA, 3977 bp, Homo sapiens; identical to SEQ ID NO: 1999

SEQ ID NO: 2002 - DNA, 498 bp, Homo sapiens; identical to SEQ ID NO: 2000

SEQ ID NO: 2003 - DNA, 518 bp, Homo sapiens
gcatccactaggggttttggaatggatcccctgtgagtaaaggggaactacgaggtaaccttttcctgaaagctgtgaaatcagtctgccaagataaataattataactgataataggcttatcagtgtgaccacagtaaataattccattattatatacatcataccacagcgtagttgctcacttacctgtctcttaagggaacctgcatctaattatcttttaacttttagggctgacatatacttgacctataattgttgaattagccaactcacaccaaactgttttctctttccccgagttcatctggactgtgacataccacagaaatgtgttctgagtttttcttaccaatctaagcctcacacaggaatgaaagtaatttgaaataattatcaggaacattattgtactttatcacatttttatgaaaatacttcagattcctcaaacagtaatattattgattctgtacacattatcaaaaccattcttagaaaatacaaaattgcaa

SEQ ID NO: 2004 - DNA, 518 bp, Homo sapiens; identical to SEQ ID NO: 2003

SEQ ID NO: 2005 - DNA, 378 bp, Homo sapiens
tcaggtgatctgcccattttggtgtcccaaagtgctgagattacaggcataagccactgggcccagccaaatttcacacctttctgaggagagcaatgaaatctcctgttgtctcataccatccgagagtagaagcatcctttgtccagctattcacgatgtctgtctacattcgctgactgtctgcactccctgcctgttagccactcaggagccctctgcgtatcaataattgtcgtagtctagtagtgcttgtgttcaaggagcccttattttacttcttaatgaccccaaagcccgagagtagtgatgccggcaattcggatgtgccaaaaagaagccgtcatgtgcttcctttaagtgagaaggtggaagttc

SEQ ID NO: 2006 - DNA, 430 bp, Homo sapiens
aacatctttttagtaaacattggatattggttcctacttttattccactggtgggaaaggcttatgtgttcctatgtagtttatgtccaaaccgactgtaagtggttcttctgtcagcactttaaagaatgatggagggcctggcatggcggctcacacctgtaacaccagcactttgggaggccaaggcgggcagatcccttgagaccaggagtttgagaccagcctcgccaacatgatgaaaccctgtctctactgaaaatacaaaaaattagctggatgtggtggtgtgtgcctgtaatcccagttgttcggtaggctgaggcatgagaattgcttgaaccagggaggcaaagattgcggtgagtggagatggtgccattccactccagcttgggcaacagagcaagactctgtctggaaaaaaaaa

SEQ ID NO: 2007 - DNA, 430 bp, Homo sapiens; identical to SEQ ID NO: 2006

SEQ ID NO: 2008 - DNA, 383 bp, Homo sapiens
tgacctcaggtgatctgcccacctcggtctcccaaagtgctgagattacaggcataagccactgggcccagccaaatttcacacctttctgaggagagcaatgaaatctcctgttgtctcataccatccgagagtagaagcatcctttgtccagctattcacgatgtctgtctacattcgctgactgtctgcactccctgcctgttagccactcaggagccctctgcgtatcaataattgtcgtagtctagtagtgcttgtgttcaaggagcccttattttacttcttaatgaccccaaagcccgagagtagtgatgccggcaattcggatgtgccaaaaagaagccgtcaagtgcttcctttaagtgagaaggtggaagttc

SEQ ID NO: 2009 - DNA, 2223 bp, Homo sapiens
catctgtgtctttagaagtagtgtcacctctagtaaaagagggccagtagaattgagtggtggcagcctgtgatgtatatgaattttggctgtacgtctctagcgactattttctccaactctatttagtaaaattctacctaatttcagctattgtgcttccaaagtccatgtttgttgaatatgatatggtaaaaaccaatatctatttggagacagtggaggggatggtagtaattgagagacagtgtcagatggagcagtgactttacaatttttttgactgcaatccacaattagacatttcacattgctcccccatgacaacatccctatcgacccctgcccaaaaacaagttatttaccaatcttgctataagcaatgatgactgattttttcttttttctactttatttaaaaagaaaattatagtctcaactctttatattaattttacacacattaattctacagattgttttagcacttagaactaaaagtgttcaagatttgattttgttaccttctctgtgtaagctaaagttgctgacttttctgagtttccattttattgattaaaactgggatagtaatagtattttacaccattttataactttattagaatgacataatctgagtgaagtggttgtgccaggcacttactaaacacacagtcaatgagtatgttctctccgaagtttgttagcttagggaattgggaggatgccactgataataatggtgactcttattcagaggaaaactaattcagttttagacatgctagagtttgaggtagccaaaagagtttagtcatatcacttggaagcaaaccaatgtgaaatagtttcaaataagcaaattttaaaaaatgttaaatgcaaagcaaacagtattaaagctttggggacttaatgattgagtctccttacacctacacaagattggctaaatacacatacaactgtgtcactctaccagatttctgttaacattctccagaatttaaactgcagaatcagtcatttgtatgactgtttgtctctattagcagaggtaatgacatgtatcagtgataggtaattgtggaaaaaaaaacagcacttggaattaaacctagagttggtgattcttacagggtaacccaacggctaccttaatttctatgattcagtttcttcatctacaaaatattatttcacaaagttgcagttgtcaaagggacaagtaaatatgggatccattgtcttcatggaaaaacttttcataaaatgttattttattataataaaaaatgtgtgattggttttcaatttcagattgaatcaaacatagcattctttgtaatagcaggagattaacaacatcccagaatatatctttaaaagaagtatggataaagaaaaacccgtatgcacctctgcacacattttatgtaatagtggtgatactaatttacaaagacaaagtatataggatattaaaagtgaattcttaatacctgatcttgattcttattaaatctgacttatgtgtatacaagatattattagatgaagtgtttgtccagtagcttagcttataaataacccccattctagctcattttaaacaatgtagtatgaatgatgccaaaaacaggctagaacattttcttctttccaagatcttagatttggtaaacaagctactgctcctggaactaatctaggtcatcataacccaaaatcttttgaaatatgagagtcccaattaagtctcttaggtactttttagcattttaattttaagaatgtgtttaactcttaaaacagtatattttggttgctgtttggccatttggtttatttgtaccttgttataatgaatgcaagtcagtgggtaatcattgcagcaaatatgattgctaggaatctcatgtaagtggaagtcaatataatgtatggcttaatttatccctgaactgacctaacatcacattttgttttttaataaaaactggtttaatgatatgataaatttctgtattttccacaactgttaataatgttatattttaactattgcttagtcttcattacaaattattcagctgttaaatgtgttgttcaatgtgacattatttaaaaacttaaaaaaaaatcagcttcacagaaatctttctttgatcaagagttgtctcattcccattgttattaatacagtatacaactaatgta

SEQ ID NO: 2010 - DNA, 165 bp, Homo sapiens
tgcaaaggttctgaatttagaaagagtctggcatgctttaggaactgaaagaaggccaggtactatatgatagtttgtgcttccctcatttcttcatattatactgtctccttcactagaataattgttcttcaagggtggtgatgacatctgacttcttcccag

SEQ ID NO: 2011 - DNA, 4495 bp, Homo sapiens
agagctttcctaggagaatgatttgtgatggagttttacccagagcaggaataggtacggctgtgagtcacaaggtggtaggactctttatttgcttttttgcccaaatgtcatggaggacacagagcagagaacctggaaaaatgtgccattgggagaacgtgatgcaccattttaggccagaatgacgcatggaagcgtaaagtaaaaaattgcggagacaccaaaatgcatctgtgtggattgttaacaaaaaagcatgaaaatgtttgatactggttgttatagggaatcattcaaaatttcttatgcgtgtattaaatctgaaatggcaaaattaaaagccactttatcaagagaaggtcctggtattttcatatcttttcaaaaactaggaattctaatacaaagtgccaattacctgacacacttatttgataagcagaggatggacgtgtccattctcagacataggcaagcaaacagctacaatttatttagtcctgattccactgtgcttgtgctagtcaaactgagatgtagctgaaataattcagttctcattttaaactcagttttcagaataatgttcttaacgtcaatattttgagtgcatttaagtttttgaagccaagatactctgattgtaatcacatagcaggcacaaagagaggatttccacataaaggcaaaataacgttttagaaatttcttggcttcccttccttcctcctttccttcctctgctttctgtatctctgaatcatattacgtagactcaatgtagtgaccaatgctggtccatgaactattcgtcccagcccatgatgtgttaagtgttgagaagcttagatagcaatttggtagtcatcttatgcctgttgaattcagtaacaataaccataaaaggcacttgtatttgtatgcagcatttttgtttttccttgtaatatatctttattggattttgcaactgttttagcccatgacaggtggaacctttaaaaagcactattctagaaagcatggccatgtggtggatcaaactaagagaaaaaagccttaactccagaagatatctttgactcagaaatgccttccttctgctggccatgttctttgcttctgacatgtgactccgtcctgagcaggtctttcttcgagaatccttggaacagaaactggagaagcggagggaagaggaagtgagccacgcggccatggtgattcgggcccatgtcttgggcttcttagcacggtaagaaccccacgctgaggggataaggcaggaagctccatgagggggtccttccttcccagtgtgttccagtggagtggcctgaggtttttgaattgaggggagcctcaggtcaggcctcctaagcagccactcccgaaacctagctagcctgactgggcagcaggtaggaaagggagctctgcactttttgacttctcaggtagaaagaacagtgacagcagggaactctactgagatctatttatttatttgaggcagggtcttactctgtctctgaggctagagtgtggtggcacgatcatggcttattgcagccttgacctcctgggctcaagcaattctctcacctcagactcccaagtagttgggactacagacacacaccaccatgcctggctaattaaaaaaaaattttttttttagagatgggtcacttcatgttgcccaggagggtctcaaactcctgggctcatgggatcctcccggctgacaaagtgctgggattacaggtgtgagccaccgtacccagccttctcctgatatttaaattatttgcttacttcctctgcgtcaggtcttgaagccacagcggcctggctgttcaccttggtgttatcattttggctatagcagacccatcctccagctgtttgaggaatgaggtgacttcttttttttttttttttttttttttttgagacagagtctcgctcgctcgtctggctggagtgcaatggtgcgatctcagcccactgcaacctccgcctcccgggttcaagtgattctcctgcctcagcctcccaagtagctgagactataggtgcatgccaccacacctggctaatttttgtatttttagtagagacagggtttcaccatgttggccaggatggtctcgatctcttgaccttcgtgatccatccgcctgcctcggcttcccaaaattctgggattacaggcatgagccaccgcacctggcctgaggcaacttctcctcatgtgcgttttagttgcatccactatgcccgtgaaacactacgtgttacattttctgaagcacaaagctgtcctgctgtgatgatttttttcatatgaacaggagaatatatcagatctctttgggaactatttacccaactttctgccaagactacttaaagccaacatgaggggttatgtgtttatttagccaagatagtgataggcttcttactttagttttgtttgttattatttctttgtttttctcctgttttgttttgaccaaaggggcctccttgttctctccagtttccataatgagagtctcattctaaaactgggtcctcttttgtcttgtagccttgatgtgagctcatttgaatagctcaaagcctcattacttcaatgccgattctcttgttttctttcattttcagaaaacaatacagaaaggtcctttattgtgtggtgataatacagaagaattacagagcattccttctgaggaggagatttttgcacctgaaaaaggcagccatagttttccagaagcaactcagaggtcagattgctcggagagtttacagacaattgctggcagagaaaagggagcaagaagaaaagaagaaacaggaagaggaagaaaagaagaaacgggaggaagaagaaaggtacagtacctttcttgctgggatgaaacaaatggatacattttgagtgctgtgctcggtatctgtctgtgcagccagaaatcccagcagatgccccagaacctacaatttgaaacagtaactctaggtggctagaatataaaattccttggcagcattaaagacccagttctgtgaatatttttattcatacagaataaatccatggccagaggaaggggctctgtctttcatgctttctgtctttggcaaagctgttttaaaaacgtagatctctctgaaaagtggttccagggttattgttgttgattttcacttttcctttactatttttagagaaagagagagagagcgaagagaagccgagctccgcgcccagcaggtaatgagtgcagtgacaacttagcctcttgtgtttctacttccttcccacttctaatgcttggactctaggattcaaaactgaattaaagtagaaagataacaggaagaacaatttaagaggatgtgtttatgatccaatttctgacctattacaattgggtaaagcgtagtgaatggctgaggttttagtgtgcatcacaagagtataatttctctaaatcggtataaccagcgtgttagtttgctaggcccaccacagccaaataccacagactggtggattgaacagtggaaactgattttctcccagctctggaggccggaactgcaagatcaagttatccttaagtttgatgtcttctgaggcccctccccttggcttgcaggtggccgtctgtccagtgtgtcctcacgcagccttttttctctgtgtgacctagtctcctgttcccaaaaggacaccagtcatcttggattggggcccaccctagtgaactcattttaacttagtctcccctttaaaagctgtatctccaaatgcagtcacattctgcagtattggggttaggacttcaacctatagactttatggggacacagtccaactcataatgaccatatttcatcctggttgcaaagcgggagctatgcttggacttttgtactgaagccttctgaaatctcccttctgcttctgtccaggaagaagaaacgaggaagcagcaagaactcgaagccttgcagaagagccagaaggaagctgaactgacccgtgaactggagaaacagaaggaaaataagcaggtggaagagatcctccgtctggagaaagaaatcgaggacctgcagcgcatgaaggagcagcaggagctgtcgctgaccgaggcttccctgcagaagctgcaggagcggcgggaccaggagctccgcaggctggaggaggaagcgtgcagggcggcccaggagttcctcgagtccctcaatttcgacgagatcgacgagtgtgtccggaatatcgagcggtccctgtcggtgggaagcgaattttccagcgagctggctgagagcgcatgcgaggagaagcccaacttcaacttcagccagccctacccagaggaggaggtcgatgagggcttcgaagccgacgacgacgccttcaaggactcccccaaccccagcgagcacggccactcagacc

SEQ ID NO: 2012 - DNA, 4494 bp, Homo sapiens
agagctttcctaggagaatgatttgtgatggagttttacccagagcaggaataggtacggctgtgagtcacaaggtggtaggactctttatttgcttttttgcccaaatgtcatggaggacacagagcagagaacctggaaaaatgtgccattgggagaacgtgatgcaccattttaggccagaatgacgcatggaagcgtaaagtaaaaaattgcggagacaccaaaatgcatctgtgtggattgttaacaaaaaagcatgaaaatgtttgatactggttgttatagggaatcattcaaaatttcttatgcgtgtattaaatctgaaatggcaaaattaaaagccactttatcaagagaaggtcctggtattttcatatcttttcaaaaactaggaattctaatacaaagtgccaattacctgacacacttatttgataagcagaggatggacgtgtccattctcagacataggcaagcaaacagctacaatttatttagtcctgattccactgtgcttgtgctagtcaaactgagatgtagctgaaataattcagttctcattttaaactcagttttcagaataatgttcttaacgtcaatattttgagtgcatttaagtttttgaagccaagatactctgattgtaatcacatagcaggcacaaagagaggatttccacataaaggcaaaataacgttttagaaatttcttggcttcccttccttcctcctttccttcctctgctttctgtatctctgaatcatattacgtagactcaatgtagtgaccaatgctggtccatgaactattcgtcccagcccatgatgtgttaagtgttgagaagcttagatagcaatttggtagtcatcttatgcctgttgaattcagtaacaataaccataaaaggcacttgtatttgtatgcagcatttttgtttttccttgtaatatatctttattggattttgcaactgttttagcccatgacaggtggaacctttaaaaagcactattctagaaagcatggccatgtggtggatcaaactaagagaaaaaagccttaactccagaagatatctttgactcagaaatgccttccttctgctggccatgttctttgcttctgacatgtgactccgtcctgagcaggtctttcttcgagaatccttggaacagaaactggagaagcggagggaagaggaagtgagccacgcggccatggtgattcgggcccatgtcttgggcttcttagcacggtaagaaccccacgctgaggggataaggcaggaagctccatgagggggtccttccttcccagtgtgttccagtggagtggcctgaggtttttgaattgaggggagcctcaggtcaggcctcctaagcagccactcccgaaacctagctagcctgactgggcagcaggtaggaaagggagctctgcactttttgacttctcaggtagaaagaacagtgacagcagggaactctactgagatctatttatttatttgaggcagggtcttactctgtctctgaggctagagtgtggtggcacgatcatggcttattgcagccttgacctcctgggctcaagcaattctctcacctcagactcccaagtagttgggactacagacacacaccaccatgcctggctaattaaaaaaaaattttttttttagagatgggtcacttcatgttgcccaggagggtctcaaactcctgggctcatgggatcctcccggctgacaaagtgctgggattacaggtgtgagccaccgtacccagccttctcctgatatttaaattatttgcttacttcctctgcgtcaggtcttgaagccacagcggcctggctgttcaccttggtgttatcattttggctatagagacccatcctccagctgtttgaggaatgaggtgacttcttttttttttttttttttttttttttgagacagagtctcgctcgctcgtctggctggagtgcaatggtgcgatctcagcccactgcaacctccgcctcccgggttcaagtgattctcctgcctcagcctcccaagtagctgagactataggtgcatgccaccacacctggctaatttttgtatttttagtagagacagggtttcaccatgttggccaggatggtctcgatctcttgaccttcgtgatccatccgcctgcctcggcttcccaaaattctgggattacaggcatgagccaccgcacctggcctgaggcaacttctcctcatgtgcgttttagttgcatccactatgcccgtgaaacactacgtgttacattttctgaagcacaaagctgtcctgctgtgatgatttttttcatatgaacaggagaatatatcagatctctttgggaactatttacccaactttctgccaagactacttaaagccaacatgaggggttatgtgtttatttagccaagatagtgataggcttcttactttagttttgtttgttattatttctttgtttttctcctgttttgttttgaccaaaggggcctccttgttctctccagtttccataatgagagtctcattctaaaactgggtcctcttttgtcttgtagccttgatgtgagctcatttgaatagctcaaagcctcattacttcaatgccgattctcttgttttctttcattttcagaaaacaatacagaaaggtcctttattgtgtggtgataatacagaagaattacagagcattccttctgaggaggagatttttgcacctgaaaaaggcagccatagttttccagaagcaactcagaggtcagattgctcggagagtttacagacaattgctggcagagaaaagggagcaagaagaaaagaagaaacaggaagaggaagaaaagaagaaacgggaggaagaagaaaggtacagtacctttcttgctgggatgaaacaaatggatacattttgagtgctgtgctcggtatctgtctgtgcagccagaaatcccagcagatgccccagaacctacaatttgaaacagtaactctaggtggctagaatataaaattccttggcagcattaaagacccagttctgtgaatatttttattcatacagaataaatccatggccagaggaaggggctctgtctttcatgctttctgtctttggcaaagctgttttaaaaacgtagatctctctgaaaagtggttccagggttattgttgttgattttcacttttcctttactatttttagagaaagagagagagagcgaagagaagccgagctccgcgcccagcaggtaatgagtgcagtgacaacttagcctcttgtgtttctacttccttcccacttctaatgcttggactctaggattcaaaactgaattaaagtagaaagataacaggaagaacaatttaagaggatgtgtttatgatccaatttctgacctattacaattgggtaaagcgtagtgaatggctgaggttttagtgtgcatcacaagagtataatttctctaaatcggtataaccagcgtgttagtttgctaggcccaccacagccaaataccacagactggtggattgaacagtggaaactgattttctcccagctctggaggccggaactgcaagatcaagttatccttaagtttgatgtcttctgaggcccctccccttggcttgcaggtggccgtctgtccagtgtgtcctcacgcagccttttttctctgtgtgacctagtctcctgttcccaaaaggacaccagtcatcttggattggggcccaccctagtgaactcattttaacttagtctcccctttaaaagctgtatctccaaatgcagtcacattctgcagtattggggttaggacttcaacctatagactttatggggacacagtccaactcataatgaccatatttcatcctggttgcaaagcgggagctatgcttggacttttgtactgaagccttctgaaatctcccttctgcttctgtccaggaagaagaaacgaggaagcagcaagaactcgaagccttgcagaagagccagaaggaagctgaactgacccgtgaactggagaaacagaaggaaaataagcaggtggaagagatcctccgtctggagaaagaaatcgaggacctgcagcgcatgaaggagcagcaggagctgtcgctgaccgaggcttccctgcagaagctgcaggagcggcgggaccaggagctccgcaggctggaggaggaagcgtgcagggcggcccaggagttcctcgagtccctcaatttcgacgagatcgacgagtgtgtccggaatatcgagcggtccctgtcggtgggaagcgaattttccagcgagctggctgagagcgcatgcgaggagaagcccaacttcaacttcagccagccctacccagaggaggaggtcgatgagggcttcgaagccgacgacgacgccttcaaggactcccccaaccccagcgagcacggccactcagacc

SEQ ID NO: 2013 - DNA, 481 bp, Homo sapiens
agagctttcctaggagaatgatttgtgatggagttttacccagagcaggaataggtacggctgtgagtcacaaggtggtaggactctttatttgcttttttgcccaaatgtcatggaggacacagagcagagaacctggaaaaatgtgccattgggagaacgtgatgcaccattttaggccagaatgacgcatggaagcgtaaagtaaaaaattgcggagacaccaaaatgcatctgtgtggattgttaacaaaaaagcatgaaaatgtttgatactggttgttatagggaatcattcaaaatttcttatgcgtgtattaaatctgaaatggcaaaattaaaagccactttatcaagagaaggtcctggtattttcatatcttttcaaaaactaggaattctaatacaaagtgccaattacctgacacacttatttgataagcagaggatggacgtgtccattctcagacataggcaagca

SEQ ID NO: 2014 - DNA, 4409 bp, Homo sapiens
agagctttcctaggagaatgatttgtgatggagttttacccagagcaggaataggtacggctgtgagtcacaaggtggtaggactctttatttgcttttttgcccaaatgtcatggaggacacagagcagagaacctggaaaaatgtgccattgggagaacgtgatgcaccattttaggccagaatgacgcatggaagcgtaaagtaaaaaattgcggagacaccaaaatgcatctgtgtggattgttaacaaaaaagcatgaaaatgtttgatactggttgttatagggaatcattcaaaatttcttatgcgtgtattaaatctgaaatggcaaaattaaaagccactttatcaagagaaggtcctggtattttcatatcttttcaaaaactaggaattctaatacaaagtgccaattacctgacacacttatttgataagcagaggatggacgtgtccattctcagacataggcaagcaaacagctacaatttatttagtcctgattccactgtgcttgtgctagtcaaactgagatgtagctgaaataattcagttctcattttaaactcagttttcagaataatgttcttaacgtcaatattttgagtgcatttaagtttttgaagccaagatactctgattgtaatcacatagcaggcacaaagagaggatttccacataaaggcaaaataacgttttagaaatttcttggcttcccttccttcctcctttccttcctctgctttctgtatctctgaatcatattacgtagactcaatgtagtgaccaatgctggtccatgaactattcgtcccagcccatgatgtgttaagtgttgagaagcttagatagcaatttggtagtcatcttatgcctgttgaattcagtaacaataaccataaaaggcacttgtatttgtatgcagcatttttgtttttccttgtaatatatctttattggattttgcaactgttttagcccatgacaggtggaacctttaaaaagcactattctagaaagcatggccatgtggtggatcaaactaagagaaaaaagccttaactccagaagatatctttgactcagaaatgccttccttctgctggccatgttctttgcttctgacatgtgactccgtcctgagcaggtctttcttcgagaatccttggaacagaaactggagaagcggagggaagaggaagtgagccacgcggccatggtgattcgggcccatgtcttgggcttcttagcacggtaagaaccccacgctgaggggataaggcaggaagctccatgagggggtccttccttcccagtgtgttccagtggagtggcctgaggtttttgaattgaggggagcctcaggtcaggcctcctaagcagccactcccgaaacctagctagcctgactgggcagcaggtaggaaagggagctctgcactttttgacttctcaggtagaaagaacagtgacagcagggaactctactgagatctatttatttatttgaggcagggtcttactctgtctctgaggctagagtgtggtggcacgatcatggcttattgcagccttgacctcctgggctcaagcaattctctcacctcagactcccaagtagttgggactacagacacacaccaccatgcctggctaattaaaaaaaaattttttttttagagatgggtcacttcatgttgcccaggagggtctcaaactcctgggctcatgggatcctcccggctgacaaagtgctgggattacaggtgtgagccaccgtacccagccttctcctgatatttaaattatttgcttacttcctctgcgtcaggtcttgaagccacagcggcctggctgttcaccttggtgttatcattttggctatagagacccatcctccagctgtttgaggaatgaggtgacttcttttttttttttttttttttttttttgagacagagtctcgctcgctcgtctggctggagtgcaatggtgcgatctcagcccactgcaacctccgcctcccgggttcaagtgattctcctgcctcagcctcccaagtagctgagactataggtgcatgccaccacacctggctaatttttgtatttttagtagagacagggtttcaccatgttggccaggatggtctcgatctcttgaccttcgtgatccatccgcctgcctcggcttcccaaaattctgggattacaggcatgagccaccgcacctggcctgaggcaacttctcctcatgtgcgttttagttgcatccactatgcccgtgaaacactacgtgttacattttctgaagcacaaagctgtcctgctgtgatgatttttttcatatgaacaggagaatatatcagatctctttgggaactatttacccaactttctgccaagactacttaaagccaacatgaggggttatgtgtttatttagccaagatagtgataggcttcttactttagttttgtttgttattatttctttgtttttctcctgttttgttttgaccaaaggggcctccttgttctctccagtttccataatgagagtctcattctaaaactgggtcctcttttgtcttgtagccttgatgtgagctcatttgaatagctcaaagcctcattacttcaatgccgattctcttgttttctttcattttcagaaaacaatacagaaaggtcctttattgtgtggtgataatacagaagaattacagagcattccttctgaggaggagatttttgcacctgaaaaaggcagccatagttttccagaagcaactcagaggtcagattgctcggagagtttacagacaattgctggcagagaaaagggagcaagaagaaaagaagaaacaggaagaggaagaaaagaagaaacgggaggaagaagaaaggtacagtacctttcttgctgggatgaaacaaatggatacattttgagtgctgtgctcggtatctgtctgtgcagccagaaatcccagcagatgccccagaacctacaatttgaaacagtaactctaggtggctagaatataaaattccttggcagcattaaagacccagttctgtgaatatttttattcatacagaataaatccatggccagaggaaggggctctgtctttcatgctttctgtctttggcaaagctgttttaaaaacgtagatctctctgaaaagtggttccagggttattgttgttgattttcacttttcctttactatttttagagaaagagagagagagcgaagagaagccgagctccgcgcccagcaggtaatgagtgcagtgacaacttagcctcttgtgtttctacttccttcccacttctaatgcttggactctaggattcaaaactgaattaaagtagaaagataacaggaagaacaatttaagaggatgtgtttatgatccaatttctgacctattacaattgggtaaagcgtagtgaatggctgaggttttagtgtgcatcacaagagtataatttctctaaatcggtataaccagcgtgttagtttgctaggcccaccacagccaaataccacagactggtggattgaacagtggaaactgattttctcccagctctggaggccggaactgcaagatcaagttatccttaagtttgatgtcttctgaggcccctccccttggcttgcaggtggccgtctgtccagtgtgtcctcacgcagccttttttctctgtgtgacctagtctcctgttcccaaaaggacaccagtcatcttggattggggcccaccctagtgaactcattttaacttagtctcccctttaaaagctgtatctccaaatgcagtcacattctgcagtattggggttaggacttcaacctatagactttatggggacacagtccaactcataatgaccatatttcatcctggttgcaaagcgggagctatgcttggacttttgtactgaagccttctgaaatctcccttctgcttctgtccaggaagaagaaacgaggaagcagcaagaactcgaagccttgcagaagagccagaaggaagctgaactgacccgtgaactggagaaacagaaggaaaataagcaggtggaagagatcctccgtctggagaaagaaatcgaggacctgcagcgcatgaaggagcagcaggagctgtcgctgaccgaggcttccctgcagaagctgcaggagcggcgggaccaggagctccgcaggctggaggaggaagcgtgcagggcggcccaggagttcctcgagtccctcaatttcgacgagatcgacgagtgtgtccggaatatcgagcggtccctgtcggtgggaagcgaattttccagcgagctggctgagagcgcatgcgaggagaagcccaacttcacactttccaagcccagaccc

SEQ ID NO: 2015 - DNA, 6920 bp, Homo sapiens
ggaggacccatacatgaacgacacggtggtgcccaccagccccagtgcggacagcacggtgctgctcgccccatcagtgcaggactccgggagcctacacaactcctccagcggcgagtccacctactgcatgccccagaacgctggggacttgccctccccagacggcgactacgactacgaccaggatgactatgaggacggtgccatcacttccggcagcagcgtgaccttctccaactcctacggcagccagtggtcccccgactaccgctgctctgtggggacctacaacagctcgggtgcctaccggttcagctctgagggggacgcaagtcctcggtaagtcctgcctggcgtgtcccagtgaaatgggtggccggtcacacccacccctgttgcatcctcaagttgaatgaagatacccgtaggatatctgtgcaaagattgcagagtcgtggtcttagagatcatcttaaaccttttgcttattccataagccaattgcattcataagtagaactttgatgtgcctgtttcagttttagcacaaagcctagagctgagctgtgcccaagacttcagaaaactggctatttatttatttattgttgttgttgttgtttttgaggtggagtcttctctgtcatccaggctggagtgcattggcaggattttgcctcactgcagtccccacctctcgggtccaagctatcctgctgcctcagcttcctgaatagctgggattacagatgcccgccagcacaccggtctaatttttgtatttttagtagagatggggttttaccatgttggccaggctggtcttgaactcctgacctcaggtgatccacctgcctcggacccccaaagtgctgggattacaggcgtgagccaccatgcccggcttaaaactggctttttaaatggaacttttgtttattttattttatttcttccttccctttttttacaatttgaatggaacttttagctttgccgtgctgcgttaggaaatgaagacacatcctgaactggaacaagacttgccaggggtgaactggcaaactttccttgtactaacttcacaatccaaaccacacgatgttatttcttatagtggctgtaaaggaagaagctgcagggcttaaatgtactcttttccagtttctggatttatctgtagtttacttttattttgtcgctttggtcgtgcattgaatgttctcttgactttcaaagatttgaaaatatatttaatatagtaattcagagggggtgaactcttgcatggtttgattaaaattatagccttaaaaagcattgttagttttagggcagatagcctttggattcaagtatatcttgtctttcatgtatcaattcaactgaccatttgaccttaaaagttggtatttttaattccgaattatttgtgtgctaccgtaaatcaggcgtattgcttgtcagttgttttttttctttttccttttccctttttttttttttttttttttgagactgaggcttgctctgttgcccaggctggagtgcagtggcacgatctctgctcagtgcagtcactgcctcctgggttcgagtgattctgctgcctcagcctcttgagtagctgtatttttgtattttttcaatgatgatacatgctgggtatcttcgtggcttgctttgtggccttttccctcaccgttggcttctctctctcggtccagtttgaagatagtgaagaggactttgattccaggtttgatacagatgatgagctttcataccggcgtgactctgtgtacagctgtgtcactctgccgtatttccacagctttctgtacatgaaaggtatgactgcagccgccatggagtctgggttagggggagagcgaggcgttattttatccgggctgatggatggcggtgggaaataacggaggtgttattgtatctgggctgatggatggggactgggaaagtcgttctacctacccttacctcagtgttgggccacttagatgaatgaagggacaccttgtcatgttggtgtgacatgggtgctgtggtcctaccagcatgaacacagtcgtgactcccctggtttggtgcagagtggcaggacgaagcatttgcaaccactgcctccagtatcagtccttctcccctgtctctccctgtctcgttttcctttcttagctctttcttcatccttctattttctctccctctctctcccactttctctttcactgtctccctctctgtctcagtctcattgctctctctcatatatacagacatacaaaccaatgtgtgtgttgctgctgctgctggaattggtcgagacccattctcatgataaactgcatgttctcggccgggcgtggtggctcacgcctgtaatcccagcactttgggaggccgaggcgggtggatcatgaggtcaggagatcgagaccatcctggctaacacagtgaaacgccgtctctactaaaaatacaaaaaattagccgggagcggtggcgggctcctgtagtgccagctacctgagaggctgaggcaggagaatggcgtgaacccaggaggcggagcttgcagtgagccgagatcgcgccactgcaccccagcctgggcgacagagccagacgctgtctcaaaaaaaaaaaaaaaaaactgcatgttctctcctgccagggatattagagagcctaaaaggatgtgctagacatgggggaaagtgaagatctcactgaggcccactgctggcttgaactgctcaccatacctacttcatgatgagcatttgcattgtatgctttgattgttactaacatttgagtatactttgctgaaccttaacacttaggggccttgaggcacactccttttggaaaattatttactatttatttatctatttatttaggtatttatttaagacagggtcttgctctgttacccaagctagagggcagtggtgtggtcatggctcactgcagccttgaactcaggttcaagccatcttcctgccgcagccttcataggagctaggactgcaggcgcacaccatcatgccaggctaattttttatagagatggaatctcactatgttgcccaggctggtctccaactcttggcctcaagcagtcctcccaccttggcctcccaaagtgcaggaattgcaggcatgagccaccatgcctagccagaaaattatttaattatttaattgggacctcatatttatgctttgttcctgttcttgactctgactcgtaactcagtgacagggataataagaaaccataatcatcaccaattttgggcaggagttttacgtggatggttaaaaagaagggaccgtcctgtttctcgcatggacctagactggagaggggagagagtcgagaaggtggagatgggcagggatatgagaaccttcctccccaggtctcctcttcctgctttctcccatatttgatttttaaatttgtcttcttcctttttcttcactttcctttttattgccgtctttcttcatttacatttacattttcttttttttgtcttcaccaccatgaaaaccttttttttttttgagacaggatcttgctctgttgcccaggctggagtgcaatggcacagtcgtggctcactgcagcctccacccccggggttcaagtgattctcctgccttagcctcctgagtagctgggattacaggcacacgccaatgcccagctaatttttgtatttttagtagagacagggtttcaccatgtcggccaggctggtctcgaactcctaaccttgtgatctgccctccttggcctcccaaagtgctgggattacaggagtgagccaccgcgcccagccatgaaaacccttttattccattttcccttctttctttctgtgcttctcttttctgttagcttctttacgtttttttccacgtcttttcttttgttatcttcaatattttttttctgttttcttcacttgtggctttgtttgctggattccttttttgcttcacctgctcctcttagaaaacatgggtctagtgacgactgtcagtcatttgcctttcagagttctgccatcctcagctttggagccccacagtgctcatgaaacccctagaaggtttggtttaggggagacttttagtaggactgttggaatgaaaaacatcaagggtgaggtagccagcactggaacacctgacaaaggaaaaaatgtcattgcaaatcagaacctttgatccaataagtatttaatcatagcatcttaagattttctcagttagaaatcatcttaactgtttttactaatatataattcccattcctcaatttttaattccctaagttaatttgaaaattctcttcaatattcctcttaatgtatgacattgatttttttttttttttttttgagacagagtctcgctctgtcacccaggctggagtgcagtggtgcgaactcggctcaccacaactgccgcctcccaagtttgagctattcttctggctcagcctcctgagtagctgggattacaggcgtgcgccaccacgcctgactaatttttgtattttgagtagagacggggtttcaccatgttggccaggctggtcttgaactcttgaccttgtgatccacccgcctcagcctcccaaagtgctgggattacaggcgtgagacaccacgcccggcagcattgatttattatacagttactggattaaaaccagtaagagtaggaaaaaagtaaagacacattcaaagtattaaaatcagggtcaaagaagttaaatgggtgagttttcggcatctcttaaagctattgtgtaaatgcagcctcatttaatacttaataaaactttaattaaagcagagccaaaaagtttcagagcaacgaatgaatgaaaaagaaaatctaatcaccaatttatattttatgggcataaataaatttttacaaccaaataacctactaaagatgtttgcaattaggaaattatagcattaagtgattctctaaatgatgaattatcaagagagggcctgaaattgcaaagggagggccaagagtgagtgctatcaataaataaataaataaatctaattaatcaattagattaaataaactaatggtgagagctgtcgtgatgactcttctaatctttgaaacaactgtgaataagctttatcatttaacaacaacaagataatagaataattttgcacagttttcctccaggcttgttttgagaaacccagattaaagtcacaaatcaaaacactaataatgtttcattctggtagccgttggcaagtttgccatatgttaggacacggctctgcagcttggcacaattaccaaagatgtctcagctagatgagcaggggcctcttggacaaaaggagggagaggagtctagaaagttcagtgaagcaagtgcactgtctggttttcacacagtgaacgcataaaaggataggattatacttactttaaatatcccatgtttaaatgacccttattttcattactggttggtcaaaagaaaataatgtgtggacagtcttataataacagatgtgtgtcagatgttgatcttgagcaggttggggaatctggaatacaaaattatcctccctgaagagcatagcaagatttttttatcctatgaaagataacatctgtatatttaagttcaaatcttagtgtagtttgtactcttgctttctttttttttttttcatagtctcagtcttatacctgtaaaccattttcagatgatgcttttctttgaaaagatgtttttctccaaaaagccatattgtctttacctgtgtaagttagactttatcagtcaaccctggaatcactgataattcttgttcgcacattgaccaaatatggaaggaaatgggtaaactttgtttattttttgagacggagtctcactctgtcacccaggctggagtctagtggtacaatctctgctcactgcaacctcctcctcccggattcaagcgattgtcctaccccagcctcccaagtagctgggattacaggcacgcaccaccatacccggctaatttttgtatttttagtagagacagggttttaccgtgttggccaggctggtcttgaactcctgacctcaagtgatccacccgcctcggcctcccaaagtgctgggattacaggcatgagccaccgctcctggcccaaaaaacgggtaaagaaactggtaaactttgacaccatgttaaaataattttccctctctggtgcattttgggataagcctgatccatacatagggacatggttctcacccttggcttttgactcattcctgggttagagtgtcagttcattacttgcttttctattggctcctttcaaagctttctcagctaagtgagcaggaactcctttggatagaaggattcttgtataatccagcctggctggtgtgacatctgtgtggtgcccccagacatgagctagcagtgccactcctcactgaggggtctctgcggtgctgcggctggggcagagtctaagctcggctagaccttaacacctgctatgcatgttgttgtcatccaacttgactgacttttctttcacccctctctacccaatctcacggggaacaggtggcctgatgaactcttggaaacgccgctggtgcgtcctcaaggatgaaaccttcttgtggttccgctccaagcaggaggccctcaagcaaggctggctccacaaaaaaggggggggctcctccacgctgtccaggagaaattggaagaagcgctggtttgtcctccgccagtccaagctgatgtactttgaaaacgacagcgaggagaagctcaagggcaccgtagaag

SEQ ID NO: 2016 - DNA, 32219 bp, Homo sapiens
cggccaggctggtctcgaactcctaaccttgtgatctgccctccttggcctcccaaagtgctgggattacaggagtgagccaccgcgcccagccatgaaaacccttttattccattttcccttctttctttctgtgcttctcttttctgttagcttctttacgtttttttccacgtcttttcttttgttatcttcaatattttttttctgttttcttcacttgtggctttgtttgctggattccttttttgcttcacctgctcctcttagaaaacatgggtctagtgacgactgtcagtcatttgcctttcagagttctgccatcctcagctttggagccccacagtgctcatgaaacccctagaaggtttggtttaggggagacttttagtaggactgttggaatgaaaaacatcaagggtgaggtagccagcactggaacacctgacaaaggaaaaaatgtcattgcaaatcagaacctttgatccaataagtatttaatcatagcatcttaagattttctcagttagaaatcatcttaactgtttttactaatatataattcccattcctcaatttttaattccctaagttaatttgaaaattctcttcaatattcctcttaatgtatgacattgatttttttttttttttttttgagacagagtctcgctctgtcacccaggctggagtgcagtggtgcgaactcggctcaccacaactgccgcctcccaagtttgagctattcttctggctcagcctcctgagtagctgggattacaggcgtgcgccaccacgcctgactaatttttgtattttgagtagagacggggtttcaccatgttggccaggctggtcttgaactcttgaccttgtgatccacccgcctcagcctcccaaagtgctgggattacaggcgtgagacaccacgcccggcagcattgatttattatacagttactggattaaaaccagtaagagtaggaaaaaagtaaagacacattcaaagtattaaaatcagggtcaaagaagttaaatgggtgagttttcggcatctcttaaagctattgtgtaaatgcagcctcatttaatacttaataaaactttaattaaagcagagccaaaaagtttcagagcaacgaatgaatgaaaaagaaaatctaatcaccaatttatattttatgggcataaataaatttttacaaccaaataacctactaaagatgtttgcaattaggaaattatagcattaagtgattctctaaatgatgaattatcaagagagggcctgaaattgcaaagggagggccaagagtgagtgctatcaataaataaataaataaatctaattaatcaattagattaaataaactaatggtgagagctgtcgtgatgactcttctaatctttgaaacaactgtgaataagctttatcatttaacaacaacaagataatagaataattttgcacagttttcctccaggcttgttttgagaaacccagattaaagtcacaaatcaaaacactaataatgtttcattctggtagccgttggcaagtttgccatatgttaggacacggctctgcagcttggcacaattaccaaagatgtctcagctagatgagcaggggcctcttggacaaaaggagggagaggagtctagaaagttcagtgaagcaagtgcactgtctggttttcacacagtgaacgcataaaaggataggattatacttactttaaatatcccatgtttaaatgacccttattttcattactggttggtcaaaagaaaataatgtgtggacagtcttataataacagatgtgtgtcagatgttgatcttgagcaggttggggaatctggaatacaaaattatcctccctgaagagcatagcaagatttttttatcctatgaaagataacatctgtatatttaagttcaaatcttagtgtagtttgtactcttgctttctttttttttttttcatagtctcagtcttatacctgtaaaccattttcagatgatgcttttctttgaaaagatgtttttctccaaaaagccatattgtctttacctgtgtaagttagactttatcagtcaaccctggaatcactgataattcttgttcgcacattgaccaaatatggaaggaaatgggtaaactttgtttattttttgagacggagtctcactctgtcacccaggctggagtctagtggtacaatctctgctcactgcaacctcctcctcccggattcaagcgattgtcctaccccagcctcccaagtagctgggattacaggcacgcaccaccatacccggctaatttttgtatttttagtagagacagggttttaccgtgttggccaggctggtcttgaactcctgacctcaagtgatccacccgcctcggcctcccaaagtgctgggattacaggcatgagccaccgctcctggcccaaaaaacgggtaaagaaactggtaaactttgacaccatgttaaaataattttccctctctggtgcattttgggataagcctgatccatacatagggacatggttctcacccttggcttttgactcattcctgggttagagtgtcagttcattacttgcttttctattggctcctttcaaagctttctcagctaagtgagcaggaactcctttggatagaaggattcttgtataatccagcctggctggtgtgacatctgtgtggtgcccccagacatgagctagcagtgccactcctcactgaggggtctctgcggtgctgcggctggggcagagtctaagctcggctagaccttaacacctgctatgcatgttgttgtcatccaacttgactgacttttctttcacccctctctacccaatctcacggggaacaggtggcctgatgaactcttggaaacgccgctggtgcgtcctcaaggatgaaaccttcttgtggttccgctccaagcaggaggccctcaagcaaggctggctccacaaaaaaggggggggctcctccacgctgtccaggagaaattggaagaagcgctggtttgtcctccgccagtccaagctgatgtactttgaaaacgacagcgaggagaagctcaagggcaccgtagaagtgcgaacggcaaagtaggttgctaagcctggctgtggcccgatgggttgctcatggtttatgctggtggtcatagagccatgctgtgcaagttccttgcagcggcagtagcctgtagcaggtgtcctgatagttcagttcagtaggttaaattactaggaaactgggaagcaagacttaatccatgagtactttgctttttgtgattacactcagacatgtggctgtcatttggaagatggccagccaattggatctggaagttgcctggtggaaacggaattgaatgtgtggaggaagaatggtgtgaatttggaacaagtggctgagtctttttatgggttaatgtatcactttcaattccttactccagctgttgccagcagataaattagctaaattaaaagcagacagactggaggagttttccgaaataaatcacttctcttctgttataccagtgttggttatactagccatccccattcccagcagtgagaggaacagggctggtcttcaaatccaacatgcccccttttctgccacacccttatagaaccaaagctttggactattgagggcctattatttttgttaaaagactaagtaatgtttccagaaaattgttgggagttacaagcagctggttttctggggtaactagatactaagcctgaaaacatgtttggggataacctgtagccgtactccactcaaaactgagtgacctcaaatatttagaaaagtagtaaaataatctttgagggatcaaattaatgcctgaagtcaggagccttaaaagtaaaatgtttctaatcagccagcatccgcaacttcagaaaagtattcattgtaaagtggaaagttaaatgaggagaagaaagtcttttatgtatttgattgtaagggaaaactcatgtctctgcagacggcagaatattggacatttccaggctgtccctttggagttcatgaggtgcgggagtgcgcttgtgagaatcctgggtctgaatcctgcaagggttcacagcaaggcatggctctgttgcctctgccatcttctctcagcctcacataccgtgatgttcctcatctgtctatagatcaattgattgactgacagggtctcactcccattgcccaggctggagtgcagtgacacgatctcggctcactgcagcctcaacttcctgggctcaggtgatcctcccacctcagcctcccgagttgttgggactataggtgtgtgccaccacgccaggctaattttttgtattattggtagagacggggtttcgccatgttgcccaggctggtctcaaactcgtgggttcaaagccatccgcctgccttggtctcccaagtgctgggattacggccatgatgtttctctttaattatcccatagaaggggccacaagcaccaagaagctgtgagagagggaggcatagtattgaatttcaccagagtacattgatgtatgtttcttttgcaactcactttgtatgctgcttaataaaagctctattcttaggtgcttcatcagaattatactgagttatggaaatgttagctcttattcagccatttctgtcacctcctatagaacaggaacagtgagttattatggaaaacttcaatcatgggcaagagtgggtggaagaatataataaaccacggacttattccagagctttcggtggctatccacccatggccaagagtgtttcatccacagttctatccagtccgctcccccagcaaaccacctccttttatagcaagtccctatcatataatttcttctgtaaatatttagtaggtatttaaacattctaatacataatcacaataccattatgacattaaaaaaataatgttagctcctaatattatccaaactcccagtcattgttcagatttctgcagtggccttatttttttatttttatttttatttttttgagaccaagtctcactctgttgcctaggctggagtgtagtggcacaaccttggctcactgcaacctctgcctccctggttcaagcgattctcctgcctcagcctcctgagtagctgggattacaggtgcctaccaccatgcctggctaatttttgtatttttagtagagacagggtttcacatattggccaggctggtctcaaactcctaacctcaggtgatccgcacacctcagcctcccaaagtgctgggattacaggcgtgagccactgtgcctggcctgcagtttccttataagtggaggtggtagtgttcttgttggtttgggttggttttatagttattttcttcaagtcagaatccaaatgaggtctagatgttgtcactggtttttagatcactcaagtctcttttaatgtatagatgcccctctgcctttctttcacttgctgtttgtaatggaacatgttagctcgcttatcccatggtttctagatttcaccaaccctatatgggcatgtgtttgaacgtgtttctctttctcatttgtttcttgtgaattggtcattagacctagagagtgatcgagttcaggttttctttctgtttaagagtgcttcacttgtgttggtattgatttctgttaagaaggcttagagtagctggttgtcctcttgtgatgtcagcagtagttctgatcttgatttttttttttttttttgatacagagtctcgctctgtcactgaggctggagtgcagtggcaccatgtcggctcactgcaacctctgcctccagggttcaagtgattctcctgcctcagcctcccgagtagctgggactacaggtgtgcactaccaagcttggctaatttttgtatttttagtagagacgggatttcaccatgttggccaggctggtctcaaactcctgacctgaagtgatccgcctgcctcatcctcccaaagtgctgggattataggcatgagccgccacgcccggccctgatcttgatttttttttaaatatttcatctcagtgattctagctatgaggtcagataatacttattttctaaccagactattttagttttgttgctgtaaaatacatgttttattgtgaacatttgtacttttttttttttttttgagacggagtctcactctttcgcccaggttggagtgcagtggcgcgatctcagctcactgcaagctccacctcctgggttcacgccattctcctgcttcatcctcccgagtagctggaagtacaggtacctgccacctcacccagctaatttttttgtatttttagtagagatggggtttcaccgtgttagccaggatggtctcgatctcctgacctcatgatccgcccgcctcagcctcccaaagtgctgggattacaggcgtgagccaccacgcccggccgaacatttgcacttctttagttatcagagcaagctggctttatgccccaaacccttcttcatcaaacgtattactatctctggtctgatcctaacatctgctgctgttttaccctgattttgttaacctggttcaccaattttatttctctagtgttgtttagggagggttgcagatgagatcaagatggtattgagaccaaacaccccaaatcctgcgcctcactcccagcacccctgatggaaataatgtgcacatctcaagcagaattcagacgcagatgccctggccttaagctgggagagagctgtgatgaattagggaaagagctcacgccgggccgaggttggcttttgtagatttgagaaagggtccaaaggaagttgcaggcaggagtgggggctgctgcccctggcctgtctgggtcctgagcaggggtgggcattgggcagaccagtgtgaggggagagagcctctcccctagagaagtcaggggaaccctgctatccctggccacaccagcagcctcctccctgggcagcagagatgagactggctccccctagagggtgtcttcatcattgctaaaagaaaaaccattgtaggtccctccatgtcttttggtgacgggttccagaaccaccaccccactccccaccccactgcagccatcaaaatccccagatgctcgagttcctgctataaaaggatgtagtcattgcatgtaacctatgcatattctcccacatgcttcaaatcgtctctagattacttacaatagctagtatgttgcaaatgcattgtaaatagtagttacactgtattgttttttaatttgtagtattattattttttaaattggatttttatttttgatctgctgctggttgaatccacaggtgcagaacccacaaatcctgaactcgcagatatggagagccaactgtgtaccgtttcgtcagtaacagacagttcccaactctagtcattggcttcattagttgctttcctcagttattcagaatttggtgttcctgatgtgcgtttgttgcttttgcttctttgcagagagatcatagataacaccaccaaggagaatgggatcgacatcattatggccgataggactttccacctgattgcagagtccccagaagatgccaggtgagtctgcgctgttgactttgtgttacccacatcctgctccctcatgcacaggtgtgagcatcacacagagcactgtttactgtactggccttgaaaaattttaattgactttttttgaagaaccaagagtcatacgagattgatgcacttgtcccttggggaatctttccctgggcaaatgtgttcaagtacagcacagagttcaggatttccagcctccagtgccactagacagatccattgtcacctgtctctcaggctgttactgtcaccggtagcgtgtgtaaattatacagctgcatgaagctgaaaatctaccctctggaagcttctgagctttgaaagtgaatcatttgtgtttgcataaggacgaaaaagggcagggagcagtaactaatggctgtttaagtaactgatagtgctatggcactggggggttttaaagatcttaatattgaagaattcaatggaagaggtactaacttacacagaacttactattagcttggtgcaaaagtaatcacaattatatttcaggctaatattctaaatgtttcatacctaagtatttcaggaagtattctaaatgcttcataaatattaactcttttgattctcttggatcctgcaaggtagacattaattattaccatcatccatactttgcagaataagagactagggtacagagaacggttagtatcatttgtaatgcagtgcaacctcaattctgttgaatggagacattgaacttcttaaaaacatttgctcctaaggagctttaacttttgactgagattagaagagggtggaggccttcattggctggggcaagttgtctgtagcttcctggacttcaggtttccatgctggagtgctgaggagacatagcacaaaattaaggagacttagcatttgctcttcagtgtgatggatcacagggtcaccttgtggatctgacaccgtggaacgtctgtcctgtctattcctgcagcttgtgagtttgtgagtctgcagggttatgctggaggtgtctgagcaatgccagagaacatcttttttttttttttctttttttttgagacagagtttctctcttgttgcccaggctggagtgcactggtgcaatcttggctcaccgcagcctccaccttccaggttcaagcaattctcctgcctcagcctcccaagtggctgggattacaggcatgcaccaccacgcctggcaaatgttgtattttttatagagatggggtttctccatgttggtcaggctggtctcgaactcccgatctcagatgatctgcccatctcagcctcccaaagtgctgggattacaggcgtgagcctcttcctggctgagaacgtcttttaatttacgagggtaacatccaatagccgaattcttcaattctcagccccaagatcattaggaccttctagtatgttctcaggacccctcactaccccttgccctttgaatctttctgagttgatacagtaccatgatagcaacattaagggtaaagacaccagaaaataattcttcccatgggaacaaactaaaacacctgcttagacccataaattctaacacaaactggaaaaacaagcaaacctggaattatagcccatcattctgtctgggactcctggagaccacatgtggttgtttgtggcccagggaatgcctgcagcttttcagctgaattataggcccagcgtttggcagctgccctgtctgttttatgccacgatgaacctgctaaatttaacctttggaatattttagccaaggactttttctcctgaccagtggaacactattttaaaaaaattccttttcagattccaagttatacttgattcaagagaagaaatttataaatttaagagtctaatctagacagaattgaaagtgcaacaaatttgatgcctttgtgtatgtgattcctacaacttgaatgtatgtctttttcaatgtttaatttgggatatttttgagatgagcaaagcaatgaagtcttgctgtttggttaaccagaatggatagtgcaaatttatattaaagtgttttccttgttgtatacaagagatatgcatatctcttgtatatgttgaatattttcaagcttgtagtcacatttttctcccttaggaagcacgcgagatagattttagtgctttgctgtaaatcgtttgcacagcctacctttacatatggtgtcatttttttaacttaaacatgccattggataccaagtacttcccctctgccttaaacagtaggagtatatatatattttgtgtcttataagcccccagcaggagaaggataccctagcgtctctttcatatttgatagcgctcacattttgtagttggtcagtaaatgctagatggatgcatgtctgttcatagtcattttcctgatgctttgttctgcttgatttttcttaagttgacatgttttgtttcgttttgtatttgttttttttgtgaggcagagttttgctctgtcacccaggctggagtgcagtggaataatcgtggctcattgcagccttggccttctgggctcaggtgatcctcctgcctcagcctcccgagtagctgggactataagcatgtaccactacacccagctaattttttatttttcgtagagactgggcctcagtaaatttcccaggctggtctcaaattcctgggctcaagccatcctcccaccttggcctcccaaagtgctggaatcacaggtgtgagccaccatgcccagacacgttttcctttattttctgattgtgatgaggttggatgtgagagtactcatttgaaataaagatggaagagttctctggtcaaaatagttttctactttaaaacagttatttttcatttccaactctcctgtggttttattgacttgagtagaaatgctgttagatggttgaaaaccccatcctgggaatacataacaaaaatagacatctaggccaggcacaatggctcatgcctgtaatcccagcactttgggaggccgaggtaggtgaatcacctgaggtcaggagttcaagaccagcctggccaacatagtgaaaccccatctctactgaaaataccaaaaattagccgggcatggtggtgtgtcccagctactcgagaggctgaggcaggagaatcacttgaacccgggaggcggaggttgcagtgagccgagattgtgccattgtactccagcttgggcaagaagacacattccatctcataaaaaaaaaaaatagacatctagtggccattccaatatgatactctccattacatgttgagtatcccttacccaaaatgcttgggactggaagtggtgcagattttggagtttggaatatttgcattagacttaccggttaagcatccctaatctgaaaatttgaaatgttccagtgagcatttcctttgagcatcatgtcggtgctcaaaaagttttgaattttgaagcatttcagatttcagatttgttttggattatggatgctcaacctatattgatcttctcaccttaaaatttatgttttaaaacagaaaaagcacctgaatgttccctagtttataagtaatatcttaagtaaggatccttgatataagtattttgggtagaactgaggatttattatttgctgttaatttctcaaggaactcattcatcatcgtcaaatgtctgtaaaggtctatgggacctggagaaaaggccgtccattgacctaaagttagaacataatatagcactaaaaggcatttacacgtactttatctgcttcttctcactttattctttggtaatgaaactgacatttacccctaagaagtaatcaaattaaaagcaaaggtgcttagagatgtcattttcacagagcacgtgcagtagggcactattgctttgccagtacgaggttggcctctccttgacagttgctctctcttccccacagccagtggttcagcgtgctgagtcaggtccacgcgtccacggaccaggagatccaggagatgcatgatgagcaggcaaacccacagaatgctgtggtacgggagcactgtgtgggatgggggtggggcgtctaggggcagggacggggagggcgtcaggatggtaaaaaagggaaagattgggaatttccagacagtctttttttaaaaggtaaatatagaataattaaggagaaaaacaggaccatttgagtttagaatcaatacaataataaatataataagtggtacaatataatacaataataaatacagtaaattaagttggacactgtggctcatgcctgtagtcccagcactttgggaggctgaggtgggaggatcatttgaggccaggagttcaagaccaacctgagaaacatagcaagacactgcctctatgaaaaaaattaaaaattatccaggcatggtattatgggcctgtagtcccagctacttggcaggctgaggcaggaggattgcttgagcctgagaattcgaggctacagtgagctatgattgcgccactgaactccagcagcctgaccctgtctcctaaaaaaacaaacaacaaaaacgaataaattacagaaggttgtaagtagtaatacattccagttctctcacctcaaacctttaaaagaacaaaagaaataatcctactttttatgaagtcacggaagtacacatcacacttactcttcagaggacttggtgaaatctaaattgtattcttattttttttttttgagatggagtctcactctgtcacccaggctgaagtgcagtggcgagatctcagttcactgcaacctccgcctccaggttcaagcaattctcctgcctcagcctcccaagtagctgggactacaggcgcttgccgccacacccggctaattttttgtattttagtagaaacagggtttcactatgttgcccagtctggtctggaactcctgagctcaggcaatccacatgcctcagcctcccaaagtggtgatacaggcgtgaaccactgtgctgggccgaaatccaaattgtattctttgtcttccctctatcccagacacaaagttacaaaaccctgctttggaaaccaagttttatttcctcatcagaaaatcttgaaataaagtttcttaggagaagaagtgtaagatttaattaaaggacacaatataatcaggaaatttgtactattgaaagaaggtcataaacactgttcactgaacatattttaagaataagaggggccaggtgcggaagctcagacctgtaatcccaatactttgggaggccaaggcggatggatcacttgaggccgccaggaatttgagaccagcctggccaacatggcgagaccccatctctactaaaacacaaaattatccaggtgtggtggcccacacctgtagtcctagctacttaggaggctgaggcacgagaatcacttgaacctggaaggcagaggttgcgttgagctgagatcacaccattgcgcagcctgggcaacagagtgaaactctgtttcaaaaacaaacaaattaaattaaaatagaggtacttgtagaaaacttagttaaaatatttttaaaaacaaagaaataaattattgaaaggttaagaggtaatgattaacttgtaattttaaaaaataaatggcctatagattctgctccgtgtagaggctatttgtactcacacaacagaggagtcgtctcatagataactattattttgaagttaaaaagaaaagagccttttctgtctgattgggagttgtgggctagaggtattactgtagtgtgcaccctactttagtgcttctctcattctgtttactttttgttcttttccagggcaccttggatgtggggctgattgattctgtgtgtgcctctgacagccctgataggtaagctcagatgtggctcttaacaaaaacagctcatcacctgtgtgtgtccacaggtgtctgtgctgctgggtcacgaccctcttcacagggctgtgaaatcacgcaaggctgtgtgttcccaccttgtcaaccccagcaatccagtcttccttcttggtacccaattttacatcacctggaagtctccttctctgggtatctttggagtcctggggaaaaccgtgggaacctggacaattttaaaaagcatgaggaatatttttaatgtgtatacagggacaaacttgggatttatacaggaagaaaatgcctgtttaggaaaatgatattccagcaaaggggaagggagtcattctcctttctgaacttaacgataaacttgaaaaggattttgatgataatgtatatgtagagtattaataaaccacaaacattgattttccttgacatttcttctttcttggcaccctttttggttttgatttttgaaggcaaatcatctttggagatgatcttacgcgtctttgtgcccagtgaacttcatctttattgtctctgtttttctgtattatcttgtaagttctacttctggcctgcagcagaatttaagaaaagtttctctaggacggaccagagaaagaatcaaaattgtcttctgccctcagtaagatgctggaaagtgaatacgagtgtgttaaaattgacaacaaaatatagtgcctccttggcagagttagagtgctggggtctctgtcagtcaccctcccgttgacaagagcccttctgaaccatgggtcctttgtttttagtagtcagcttgcaccccttataactggctcaggaatctttaacacgtatgtgtcatatccgtaatcaaagccctggtgcttcttattctggtatgtgagtttctaccttaccttctccacatctttactctcccaagcccttcactcctccaggctgggcatgtgatgatccatccttagaattttgcatcctcattcagggttttctctcttcctcaactggccacttttctcccttgccaactatagaaaaaggctttttttattttttatttttaaggggcacctcaagtttagcctgtttgcatagcttttcctgtgtcctgcagtccagttactctttttcttaaatttttgtgtcacctaactacagtgaacatttgaagacttgcaagaaagagttcacattctctagcttaagccgttagatagaggagttagtatttatattagcaagggcctatgagagaggttcagggcatttccagacaaaaagaggtgagggagaaagtaaatttccattatcacgttatccgtgactaggaaatgcacccttgttagatcactttggaaacccggacccaggtggctttttgtataaagcgtaatcaagcatttaagatgctccacctacacctatttactgatcctcttttattgctggtgtctgacatttcattaccaacccacagaaatattacccaagggcaggaagaaattgactttggagaggcatcaaaaaaaaattttccctcatggtcaccttgtttagccttcccggaactgagtttcatctggaaagttttgcatgaagaaatgttttcccttccaggaccttcagaatgaatgtgttgctccaagtttaaaggttaatgatgcgtaaaagaaattctgcagaaatgagcaacgtttgccttaataaaagcacagatagcctagcagtgtatatcccgtgacccagaagccaggaagaaggcactgagtctcggttcacacagaggtgatgctgacggtagggctaaggggctttgtttccttctcatcttgtggctcagacccaactcgtttgtgatcatcacggccaaccgggtgctgcactgcaacgccgacacgccggaggagatgcaccactggataaccctgctgcagaggtccaaaggggacaccagagtggagggccaggaattcatcgtgagaggtgactgcctgccctgcttcctcggtctgcttaacagactcccctttccatttgcatatagacatctgcagcattttcatttcgagctgcttttcccagtcattttaactgttggagattttgtaagtgatttttaatttgtgatattataaagtgtttctagagggtcatgttttttgttgctagttgtgattttgggcttttctttcatgtagtcgttccatttacatcgggttggggtgttcgtggtctttttctggcaaacagctagaaaccccacccatgtgttagcattatgcagatgattgtgtggtctttggggtttctcctcacagattttaatttacactttaatctttttttccaggatggttgcacaaagaggtgaagaacagtccaaagatgtcttcactgaaactgaagaaacggtggtttgtactcacccacaattccctggattactacaagagttcagagaagaacgcgctcaaactggggaccctggtcctcaacagcctctgctctgtcgtccccccagatgagaagatattcaaagagacaggtaaccaggctggctgcccgaaccctgagcatcaaatcttaaagtctgggcttgctccgggcaaaggaataagattccttcctagtgtgtactttatttccccccaaagaagttgtcctcttggtttatcttctaagcctgtctggggttagctatgtgaccacttagtgtttaagccgtactagaggtcgattcatggagtggtaggaagattctcgcaaggacaagaaaatgtcaacagatgcagggcatcgtacgggaagcttggttttcatatactgttttcatccttttaattttcattcttctcatttttgagacagggtctcacactgttgcccaggccggagtgcaatggtgcaatcttggttcactacagccttccagggctcaagcaatcctcccacctcagcctcccgaggagtagctaggactacaggcacgcaccatcacaccgggctaatttttatactttttggtggagaccaggttttgccatgtgggccaggctgttttccatcattgtacgatgagcgtcctatgcaacctgtaaaagataaatcctgactgtccatgaacttagcctagtagcatagaaagtacacaggtaacttagagggtttcttgtaatttttgtagtattatgaaagtgtttccagaagatggcttattttgatttttgttgctggttgtgatcttgtgcttctgtgtaacacagttgttccattcgcgtcaggtttgggtgacggttcggacagcttgcctctgaactcacacactgccaggccaagtgctgtcttctgaagggagaggctaaagaaaggaaaggaagaaataggaagtaagaaggaaagtcagaaatcagagagagttttcactcctgttccagagcccaaaaagagacattaacttacccttttcccttccagagccagttatcatttatctttatatatttaatgatgggtttattgttctaatactcatctccccatctcagctgtaaatgtcacagtgcaagagacactttttttcttcatcactagatacctagtgcagggcaggacaggacacatgtaggaattaagccagtgtctattgaattgaataattaaagggactgaggtcagagaggacacaggcattgcctcagtccccgaggttggcgttgacgtgcgtgtgctgggcacccctgccattgcaggctactggaacgtcaccgtgtacgggcgcaagcactgttaccggctctacaccaagctgctcaacgaggccacccggtggtccagtgccattcaaaacgtgactgacaccaaggccccgatcgacacccccacccagcagctgattcaagatatcaaggtaagccaagacaagcccatcaaggtgggtgattacagctcagagattctacccttagagcaccaagacctcagcattagtgaagctcagttttttttctgtaatcaaaactagtgcttggttggccggcacggtggctcacgcctgtaattccagcactttggaaggctgaggcaggtggatcacttgaggtcaggagttcaagaccaacctggccaacatgatgaaaccgtatctctactaaaaatacaaaaattagccgggtgtagtgacgcattcctgtaatcccagctacacaggaggctgaggcagaagacttgcttgaacctccgaggcagaggttgcagtgagcagagatcattccactgcaccccagcctaggtgacagagtgagacttcgtctcaaaaaaaaaaaaaaaaacacccaaaaaactagcgcttggttaaatttgtgtttgagtaccctgctttcgggaatctaaatgagaaactttagaccaaaaatgttttgtctctagggaagtgttagacattttcgctgagtcacccgatcccacctgttgggttctgtgggcagaaggatgaggtctgcagcttgcactgtggggctccctgctcatggggatgtggtgacctgcgtgggggaccacctgctttgcgtcaggttctccctcagcctcagttggagaccttctaggagtaaccggctagttccactgtcactgtacagtttccagaccacacgagtgaattcccaaggagcccagggtggtctagaagaacacttggcatccctctcaggcacgtgcaaacttccagaagctcctgagtctctctattaacaccgagcatgttacattacaaattgctgtttataagtacgtgtagtcgctcagtaaatctatgtgagatgaaggaatgaatggttgcatggcagccctgagcggggattcttaccctcactttccggaaatggaacggtgacgggggatgttctggttgcactgcccacgtagccggtcagtcccgggtgcagaaccaagtcaagggagactgctggccctccaagcagtcctgcaggcagattcccagggcaagggacagagctggggctgtgacagagaaggtgctagaatgatggtgaggcaggtattttactgatggacggcaaaggaaattagctaaccagatccaagagggaactcagtttttgtggaggtgggagaggatctaatccatcagtggtggataattttccatcaaaatcaaattggcctcctgattccaaagtggtatgttctctgggtgtttaggtgtttagaaccagattctggcaagccagttgttttttgtttgttttgagacggaggacggagtcttgcttgtcacccaggctggagtgcggtagtgcgatctcagctcactgcaacctccgcctcccgggttcaagcaattctcctgcctcagcctcctgagtagctgagattacaagcacccaccaccacgcccagctaatttttgtatttttagtagagatggggtttcaccatgttggccaggctagactccaactcctgacctcaggtgatctgcctacctcagcctcccagagtgctgagataacaggcatgagccactgggactggccttgagccaccacacccagcccagttggaaccagattcaggttgttttccatgcaacccagggcactggctacacataatttcatttttagccttaaaaaatttattttttgaagatttcttctgaaaggagtaaaactatcatgtatcagccacactcagtcttcggtgctggaacttacctgtttttgtattcttcagtttgaattcagacattaaaagagtacataggatttttcagctgggcatggtggctcatgcctgtaatctgagcactttgggaggctgaggtgggtggatcacctgaggtcaggagtttgagaccagcctggccaacatgatgaaaccctgtctcttgtgaaaatacaaaagttagctgggcatggtggcaggtgcctgtagtcccagctacttgggaggctgaggcagaagactcgcttgaacccaggatgcagaggttgcagtgagccgagatcacgccattgcactccagcctgggcaaccagagcgaaactctgtctgcaaaaaaaaaaagagtaaatatgatttttcaaatatgaagccatgcttcttaagaaataagttggccgggtgcgatggctcacgcctgtaatcccagcactttgggaggccaaggcaggcgggtcacgaaatcaggagattgagaccatcctggctaacacggtgaaaccccatctctactaaaaatgcaaaaaattagctgggtgtggtggcaggcgcctgtagtcccagctactcgggaggctgaggcaggagaatggtgtgaacccgggaggcggagcttgcactgagccaagatagcgccactgcactccggcctgggcgaaagagcaagactccgtctcaaaaaaaaaaaaaaaaaggtcaagttaccctaaataagtccataaaattgtttgaatcaatttgaatttagacattaaaagagtaaatataatttttcaaatacaaagccatgcttcttaagaaatgagtcaacttaccctaaatcagtccatataaattatttaagtaattaaaaaatttttatggccttcaattggatattactgaaaaagttttatagtggaaatgaaattaccacgatagaatgattcattacctctcctccaacttttctgtttatttaaggttctaaaagtaactttgtttttttcatatccagatgaccattttaggagcataggtacatgatgaagaaattccgtgaaagactttcttaggtttcaagggtggcacgtggaaggacagtctccccaagaatatattaatgtgtgtagttttcaggtatagagagaatagaaaacagcaattcaagaactagcaaaatgtgtttatgaaatgaactatagataaaaataacatgatttagctactgatggctaaatcaataacagaagatcagattaattttttttattttgctctcttattttttatagagacagggcctcactatgttgcccaggctggtctcaaactcctgggcccaagtgatcctcctgcctttggctctcaaaatgcacaggcatgagccactgtgcccagcctaaatttttttttgagacggagtctcgctctgtcagccaggctggagtgccgtggcatgatcttggctcactgcaacctccgcctcccgggttcaagcaattatcctgcctcagcctcatgagtagctgagattacagctactcagccaccacacccggctaattttcatatttttagtggagacagggtttcaccatgttggtcaggctggtctcgaactgctgacctcacgatccacctgcgtcagcctcccaaaatgcggggattacaggtgtgagccaccgtgctctgctgagatgaaattttttaaatgtatgtaatctccaggggagaaaatttaaaatcacatggggaagtacacgcacgagaaaataagaaatgagctgtaagaatgtatttttgtgatttgtcttcaaacacagattatgggtatcttcgtccatgaaaccacctaacactggatttccaccatctttgccccactaggtttatggatatttgagagtcttgaaaaatatttatatgtaggaaaatacaggtttcttacaataagcttgcttgctttatttttaggagaactgcctgaactcggatgtggtggaacagatttacaagcggaacccgatccttcgatacacccatcaccccttgcactccccgctcctgccccttccgtatggggacataaatctcaactgtaagtccagagctccaccccgactcctcagagaccatgattccacttgccctgctaactctttagcttaacacagaagcatttgtttttatctcaaagactctcttattcgtcgtgaattggaaggaaaagatgaaatatacttagattcattattaaagcaagacttctagagtgtggttgtagtaatgctaagattgattgctgtagtaaaagaagagatttaaaggagtcagaaaatgccagctctccccatgaactgagagtagccttttgttttgtttttgttttttgagacagagtcttactctgtcactcaggctggggtgcagtggtgcaatcttggttcactgcaacatctgcctcccaggttaaggtcgttctcatgcctcagcctcctaagtagccgggattacaagcacccgccaccacatccagctaatttttgaatttttaatagagacagggtttcgccatattgcccaggctggtcttgaactcctggcctgaagtgacccacctgcctcggcctcccaaagtgctgagattacaggtgtgagccattgcacctggccgagtagccagacaaccagatcctaagtaattttgcattccaaaaaaggattttgttcagcaacagattaccttttaagtaagcattttatgtggtaagaagttcaattagataacaaaacagtgtcaacttacccacctctgtgcttttagatctgtgttcaactgattgagatgtatagggagtgtggtgggcattgcatccgtcctcctcatttattcctttgtcttgactactgctccgattatgctcatgccctattctgaacccctcagatgagttccgtgtttgttttgcttgtcctagtgctcaaagacaaaggctataccacccttcaggatgaggccatcaagatattcaattccctgcagcaactggagtccatgtctgacccaattccaataatccagggcatcctacagacagggcatgacctgcgacctctgcgggacgagctgtactgccagcttatcaaacagaccaacaaagtgccccaccccggcagtgtgggcaacctgtacagctggcagatcctgacatgcctgagctgcaccttcctgccgagtcgagggattctcaagtatctcaagttccatctgaaaaggtaaagcatgggggcacgggagatgagctgggcagagctgcttacacaggtggggcactgggtcctcgttcagataaagaggcttttgaacagaagacacctctagtaggacagggacctctgggtcagacttgtgggttgcctgagcaagcttagagaatgctgccatcctttttaagtcacacaaggttatttcagggaccaagtcaccgttggtgtaatgtcctaatgtataggacattggatcaattaattaccactgctctatatttaaaaaaaaaaaaaaaacttggatatttgttccagatcaaagagatagaaacaatctaattgagattttgattagctatagaaaaagaagtgtcttttcttttctttttttgagacagagttttgctcttgttgcccaggctagagtgcaatggcatgatctcggctcattgcaacatctgcctcctgggttcaagcgattctcctgccttagcctcctgagtagctgagattacaggcgcccgccacaacgcctggctaattttttgtacttttagtagagatggggtttcaccgtgttggccaggctggtctcgaacttctgacctcaggtgatccacccgcctcggcctcccaaagtgctgggattacaggcgttagccacggcgcccggccaagaattttcatatgataggatgaggcatgactctttcaagtattaacaacgctgcagaggtgagttggcagcacagttgctcccagtgagacattggctctttaggggttttttgtatttaaattgaactgcacaaaatgaagcgggcccttgccaagaagtcactggtgcttgctccattcaccagtgggggaccattcactgctttggtctacagaaccttggcacagcctagttcctcccagcagccagcccccatcagtctaaaaattaacagttagtgtttgcctcctaggatacgggaacagtttccaggaaccgagatggaaaaatacgctctcttcacttacgaatctcttaagaaaaccaaatgccgagagtttgtgccttcccgagatgaaatagaagctctgatccacaggcaggaaatgacatccacggtctattgccatggcggcggctcctgcaagatcaccatcaactcccacaccaccgctggggaggtgaggagaggcagctgctgcttgttctgttagatgcctttgctgcagatacacctgcgtcaggaacattgtgcagcattagagtggctgtcctgcacagttgcagtttgcttagtacagctctcaatactaaggaaatgcatgtaacccagaagcaaccacacgaatatagagataaaaatatatatattgagtggaaacacagagataaagtacctgagacataatcttgctaatctgagaagcagctgagtgtctagcagagctgcagacctggctcaggtccagccactttgatgagggtttattgcagtgcttctgcaacaaagtgtttgtttgcacgtgactagctagatgaatatcagatgaacacattttctttttaaaatttgaacttactattataaaaccagttggccaaaagggtggtaatccaataaccaccaccccgacccccaccccccaaggcttcttatggaaaaaaaaaaaacgtcatctggagtctctgttgttccttggagttcataaatttatcagccaaaagacaggactgaagcttttcacccgcttttcctgttaatataggtttgcaagaaatcagcccagcatctgcctctaccgatgggcaaaataccctgagttattttcagcaagaaagagataaacctaatctcaagagaacaaagggaaaatagtacttttgaaattctgggatgaccacacgggtaacatttttaggaggctggagacgcccttgtgccagcagctccctctgggatcaggtgatggcacgttctgggaacacgtgttggggccgcagcctgtggaactgaagtccccctggtgtgtcttccaggtggtggagaagctgatccgaggcctggccatggaggacagcaggaacatgtttgctttgtttgaatacaacggccacgtcgacaaagccattgaaagtcgaaccgtcgtagctgatgtcttagccaagtttgaaaagtaggttccttttccctactgtgtcagaagagcaaataagagaaattgcagagcagggttcagggtttgagcttcccattccatttgtggcttcacgctgtattggagttagttttattttacctgtgttgatgcctgtttaactttgcatatccgctatttttctcgattcctagataaagctacggtcttacgtgatgtaacttgtcagtggttttttaccccattccttttctcagttccatgttggacccgtctgggtatttcttgattttttaggtttccagttgtcattagctttgaaattgggctgattgactgaagccagcttataaactctttaaactatgtgttatgtctacaatgtaaaatggacctactttttttttttttttttttttgagatggagtcttgctctgttgcccaggctgaagtgcagtggcgcaaccttggctcactgcaacttctgccttctgggttcaagcagttctcctgcctcagactcccgagtagctgggattacaggcatgtactaccacgcccagctaatttttgtatttttagtacagatggggtttggccatgttggtcaggctagtcccaaactcctgacctcaggtgatccgcccacctgggcctcccaaagtgctgggattacaggcgtgagccactgcacctggcctgtagacctacgctatttgatctgtgacttcatatcctcgaagtagcgcgaaggtattcctgcttagtataaacacagccctcatacaagagtattcacatcaatttttataaatgttatcataatgtatctgaggcttggtaaaggtaataaagaaacaggcttttgtttcttttcttcccgtggactcagcataatgcttagctggtactaattcgaatgcggctctctgaaaacacttgttagctggttaaactaggggctgcctgtttgttttcttaaagcaaaatcaggatgaaagtacgttttttcactctgtttattcctctatccccatctctatccactgttttctgggcccggacagaatgtctgtgtccttagaatacaccatgtaaagtcaggtccctgcgggtcactgaaggcccttctcgttcatattctgagcctctcttgactcctctctgtaggctggctgccacatccgaggttggggacctgccatggaaattctacttcaaactttactgcttcctggacacagacaacgtgccaaaagacagtgtggagtttgcatttatgtttgaacaggtaaaaggaatagttagaaacagatttctttgccggcaagcaagggtgaaacctgttaatacttagccttgtaagttaactggtacttagaaatgaggcacacctgtggatttcccagcaaagacaagaccagctgctctttcattcgtttgtagaatgaaacctgctacacattttatttgaacctccgttccagggactgttctagttgacaggagagagagcacaaggaataaaatatgtgacgtgtgttagatggtatctgtgctagggagaaaattaaatttaaagcagtgagccaggggtgagggtacagttttagccagggcagtcagggaaggtgagtttgagagaaaccctcatgaagtgagggagcaagcgacgtgggcatcccatggcatggcagtgcgttgaccggaaagctgttgactgtctcctttcaggcccacgaagcggttatccatggccaccatccagccccggaagaaaacctccaggttcttgctgccctgcgactccagtatctgcagggggattatactctgcacgctgccatcccacctctcgaagaggtttattccctgcagagactcaaggcccgcatcagccagtcaaccaaaaccttcaccccttgtgaacggctggagaagaggcggacgagcttcctagaggggaccctgaggcggagcttccggacaggatccgtggtccggcagaaggtcgaggaggagcagatgctggacatgtggattaaggaagaagtctcctctgctcgagccagtatcattgacaagtggaggaaatttcagggaatgaaccaggaacaggccatggccaagtacatggccttgatcaaggagtggcctggctatggctcgacgctgtttgatgtggaggtgagaactggctgccgtgtgttggggtgggctgggtgctggcatctgagaacatggatcacggccaagttcatgtggagagaagacaagatggagcattttgctctctcaacctcttttattcgagcccccagaattgtaccattaacgcctcccttctcctcacagtttctcttctcctgtgtagtaaatgcatctgtaatattaggaatgaatgcaaaattaagatgtcatctattcttctacccttccttagggaagctatagatctaattttttaaacactgataaaaatctacatttaaaaaaatgttatagctgtatatacaaattagaaactttggatatacttgcattttactttgttttttctttacagccatctgtttgaaaggaagaatgtctatctcgtaatggaatttagccattggcatcaacccagtactgatttttgttttgttttaagtagaccgcttattgaaaagaaatcttactaattgtctagatgagagtttggcaaactggtctgtgggtcagatcttgcctgcctccttttttctaaacaaagttttattggaacacagccaagctcattcctttagatatattccctggctgtttttgtacagagttgagtagttgtgacagagaccatgtgatccacaaagtctaaaaatctttactatgcagcccttaacagataagtgtgccagctcatcgtctagattagcttccattttttatgatcacagtaattcagcgtatatctgatgactttatattgaggctgtataaaattctaaatattataaattctagaatccgtgggtggcttttcattaggtgatgtttttgattggtttggttggttcaattatgcctgtttttaagtataaaaaaatcaggtgctttgtacaaagccataattccatttctccctgacaaggaatagataatagcagttaaactcttggcttcctgcaaaacgtgagctgtgaattagcatagaaagctactggcttggccgggcgcggtggctcatgcctgtaatcccagcgctttgggaggccaaggcgggcggatcatgaggtcaggagatcgagaccatcctggctaacacggtgaaaccccatctctgcaaaaaattagctgggcgtggtggcatgcacctgtaatcccagctactcgagaggctgagacaggagaatcgcttgaactcaggaggtggaggttgcagtgagccaggatcacgccactgcactccagcctgggcgacagagtgagactccgtcaaaaaaaaaagaaaaaagaaagctactggcttttgcatggaggatgcagagaatgtctggttattagggatataaactagagactcttttcagcgtctccaatttatagccctcctgcttgtccaggtttggatcagccctgtgttgttagccccttcatatggggtcttattttcttccaccaatctgtacaggaaagtctacagttaaactggtaaagtccctgttcccactctgcatatggaaggccattgctgctccttgtgaagaggagccagaactgctcagcatgcgtgatttggagaattttcctctgtgatcctagattttgtatttgaagactaaccatccgcaaagaggattggaggcagaactggagatattaatacaagagtagacttggcttgggttgcagggaagcttccttaagtcccccggccaagcatgtacgtttccaggccacttccacgtagctaatccaaacagctagtagaataatgctgagaagtggagagtcaaagcaagatgttagactctgccagttagtgaggttttcccaaaagcgtgagattaactagttagaaatcaagatagccagagaggtgccatttttcatatttcaggcccctccatgcatgcatgcacatcgaatatatttaatcttctgcacagaggacttcactcaaagcctgtcttatggtttagatgctttctgttgccaaccacttcatgacttaactcttctgttgactcttgcccaccagtgcaaggaaggtggcttccctcaggaactctggttgggtgtcagcgcggacgccgtctccgtctacaagcgtggagagggaagaccactggaagtcttccagtatgaacacatcctctcttttggggcacccctggcgaatacgtataagatcgtggtcgatgagagggagctgctctttgaaaccagtgaggtaagaggcaaagcaagttcatctttttattcatggtcttgacaaaacagaaaaacaggaccccatttcctcatgcctttgaccaggtcattttctttgaatatttttcttcaaaacacgaaaatacagcgtggtggtccctttccagctgccggttccctgcaggccaaaatctgagatcaccatattttttttgtatacttttgcaacagaggaatttggttccattttgccaaggagtcttacccttggaggaaaggcagagaaagggaagtgacatagatgtccctgaaaaagtatattatttgcaacaaaaccttatgaaaattagttagcaattatagcggtgtcacagctgtgagactcggctctggtggcctcttgagaccaggagggagccgggagcatgaccatcctgggtgcagctcattctggattgtgaaaccacacacactaaaaggcctctaaatatatgtgctaccagcctccaagtttaaaaaatataatacaagaagcttattgaggcttccacaaagggaacagctagcaagtcaacgtggtgagtggagaggaatcacctgctgcctggtttggaatggagaggcattgaggagggcgttccagctgcttggaggatgtggcattgtaggttccctaggctgatggggagtcgtgcagtgagagggaagagggtggagagcccttgactcaagggtcccaggtgccaggctgcaggatttggtgagatccagtagacaacaaggaaccactgtgggatctttgattgtgcatggcataacagtgaatttacagacagtgatctctggggtgggactggaagggaagagagcaaacagggatatggaagccggttatgatgcctgcacagggatccaggccagctgtgagaaggggtggcaatgacggggacatcatgggagggagctaatggagatcccagctggaggaggtggctggtgtggagcagaagctggcctggcgtctggggagctggccgctctcccagcccctggggcctcagttatcttgtttcttcagctgcttcctaaggagttgactagaattagatgatccagtctttaaaggctgtaattgtggactctgtcatttcacatttattttaagcggggatagtaatcccagcactgttgacaccgagtaacttcagcgtcctcggttagttctggattttaatgtgcaaagtctgacagtttccatcaagccaagttggcacgtttgtgccaccaggtggtgcacattgtatttggaaaagctgagattccacctttccctgatgaggaaggtgaaagtggttaaacttctggcttcctgcaaaatgggatccgtcgattagcatggaaagctacgggagggtgcccagggaatgtctggattattaggcagggccctttgcctgggggagacttgtgacgctgtgtcggttctgcttccccctgggcaggtggtggatgtggccaagctcatgaaagcctacatcagcatgatcgtgaagaagcgctacagcacgacacgctccgccagcagccagggcagctccaggtgaaggcgggacagagcccacctgtctttgctacctgaacgcaccaccctctggcctaggctggctccagtgtgccatgcccagccaaaacaaacacagagctgcccaggctttctggaagcttctggtctgagggaggtgtctccgaggatccttttgcctgccgccttcattgatcctgtattaagctgtcaactttaacagtctgcacagtttccaaagctttactactcttagaggacacatgccttaaaaaaggaggggaggaaccacgctgccaccaaagcagccggaagtgccttaacttgtggaaccaacactaatcgaccgtaactgtgctactgaagggaactgcctttcccccttctgggggagacttaacagagcgtggaaggggggcattctctgtcaatgatgcactaacctcccaacctgatttccccgaatctgagggaaggtgagggagtgggaagggggatggagagctcgaggggacagtgtgtttgagctggagtgctgcgggcagcctttctcatggaatgacatgaatcaacttttttctttgtttcatcttttaagtgtacgtgcttgcctgttcgtgcatgtgttcataaactcaacactttaatcatggtttcatgagcattaaaaagcaaagggaaaaaggatgtgtaatggtgtacacagtctgtatattttaataatgcagagctatagtctcaattgttactttataaggtggttttattaacaaacccaaatcctggattttcctgtctttgctgtattttgaaaaacacgtgttgactccattgttttacatgtagcaaagtctgccatctgtgtctgctgtattataaacagataagcagcctacaagataactgtatttataaaccactcttcaacagctggctccagtgctggttttagaacaagaatgaagtcattttggagtctttcatgtctaaaagatttaagttaaaaacaaagtgttacttggaaggttagcttctatcattctggatagattacagatataataaccatgttgactatgggggagagacgctgcattccagaaacgtcttaacacttgagtgaatcttcaaaggaccctgacattaaatgctgaggctttaatacacacatattttatcccaagtttataatggtggtctgaacaaggcacctgtaaataaatcagcatttatgaccagaagaaaaataatctggtcttggactttttatttttatatggaaaagttttaaggacttgggccaactaagtctacccacacgaaaaaagaaatttgccttgtccctttgtgtacaaccatgcaaaactgtttgttggctcacagaagttctgacaataaaagatactagctaaca

SEQ ID NO: 2017 - DNA, 32195 bp, Homo sapiens
ggaggacccatacatgaacgacacggtggtgcccaccagccccagtgcggacagcacggtgctgctcgccccatcagtgcaggactccgggagcctacacaactcctccagcggcgagtccacctactgcatgccccagaacgctggggacttgccctccccagacggcgactacgactacgaccaggatgactatgaggacggtgccatcacttccggcagcagcgtgaccttctccaactcctacggcagccagtggtcccccgactaccgctgctctgtggggacctacaacagctcgggtgcctaccggttcagctctgagggggcgcagtcctcggtaagtacctgcctggcgtgtcccagtgaaatgggtggccggtcacacccacccctgttgcatcctcaagttgaatgaagatacccgtaggatatctgtgcaaagattgcagagtcgtggtcttagagatcatcttaaaccttttgcttattccataagccaattgcattcataagtagaactttgatgtgcctgtttcagttttagcacaaagcctagagctgagctgtgcccaagacttcagaaaactggctatttatttatttattgttgttgttgttgtttttgaggtggagtcttctctgtcatccaggctggagtgcattggcaggattttgcctcactgcagtccccacctctcgggtccaagctatcctgctgcctcagcttcctgaatagctgggattacagatgcccgccagcacaccggtctaatttttgtatttttagtagagatggggttttaccatgttggccaggctggtcttgaactcctgacctcaggtgatccacctgcctcggacccccaaagtgctgggattacaggcgtgagccaccatgcccggcttaaaactggctttttaaatggaacttttgtttattttattttatttcttccttccctttttttacaatttgaatggaacttttagctttgccgtgctgcgttaggaaatgaagacacatcctgaactggaacaagacttgccaggggtgaactggcaaactttccttgtactaacttcacaatccaaaccacacgatgttatttcttatagtggctgtaaaggaagaagctgcagggcttaaatgtactcttttccagtttctggatttatctgtagtttacttttattttgtcgctttggtcgtgcattgaatgttctcttgactttcaaagatttgaaaatatatttaatatagtaattcagagggggtgaactcttgcatggtttgattaaaattatagccttaaaaagcattgttagttttagggcagatagcctttggattcaagtatatcttgtctttcatgtatcaattcaactgaccatttgaccttaaaagttggtatttttaattccgaattatttgtgtgctaccgtaaatcaggcgtattgcttgtcagttgttttttttctttttccttttccctttttttttttttttttttttgagactgaggcttgctctgttgcccaggctggagtgcagtggcacgatctctgctcagtgcagtcactgcctcctgggttcgagtgattctgctgcctcagcctcttgagtagctgtatttttgtattttttcaatgatgatacatgctgggtatcttcgtggcttgctttgtggccttttccctcaccgttggcttctctctctcggtccagtttgaagatagtgaagaggactttgattccaggtttgatacagatgatgagctttcataccggcgtgactctgtgtacagctgtgtcactctgccgtatttccacagctttctgtacatgaaaggtatgactgcagccgccatggagtctgggttagggggagagcgaggcgttattttatccgggctgatggatggcggtgggaaataacggaggtgttattgtatctgggctgatggatggggactgggaaagtcgttctacctacccttacctcagtgttgggccacttagatgaatgaagggacaccttgtcatgttggtgtgacatgggtgctgtggtcctaccagcatgaacacagtcgtgactcccctggtttggtgcagagtggcaggacgaagcatttgcaaccactgcctccagtatcagtccttctcccctgtctctccctgtctcgttttcctttcttagctctttcttcatccttctattttctctccctctctctcccactttctctttcactgtctccctctctgtctcagtctcattgctctctctcatatatacagacatacaaaccaatgtgtgtgttgctgctgctgctggaattggtcgagacccattctcatgataaactgcatgttctcggccgggcgtggtggctcacgcctgtaatcccagcactttgggaggccgaggcgggtggatcatgaggtcaggagatcgagaccatcctggctaacacagtgaaacgccgtctctactaaaaatacaaaaaattagccgggagcggtggcgggctcctgtagtgccagctacctgagaggctgaggcaggagaatggcgtgaacccaggaggcggagcttgcagtgagccgagatcgcgccactgcaccccagcctgggcgacagagccagacgctgtctcaaaaaaaaaaaaaaaaaactgcatgttctctcctgccagggatattagagagcctaaaaggatgtgctagacatgggggaaagtgaagatctcactgaggcccactgctggcttgaactgctcaccatacctacttcatgatgagcatttgcattgtatgctttgattgttactaacatttgagtatactttgctgaaccttaacacttaggggccttgaggcacactccttttggaaaattatttactatttatttatctatttatttaggtatttatttaagacagggtcttgctctgttacccaagctagagggcagtggtgtggtcatggctcactgcagccttgaactcaggttcaagccatcttcctgccgcagccttcataggagctaggactgcaggcgcacgccatcatgccaggctaattttttatagagatggaatctcactatgttgcccaggctggtctccaactcttggcctcaagcagtcctcccaccttggcctcccaaagtgcaggaattgcaggcatgagccaccatgcctagccagaaaattatttaattatttaattgggacctcatatttatgctttgttcctgttcttgactctgactcgtaactcagtgacagggataataagaaaccataatcatcaccaattttgggcaggagttttacgtggatggttaaaaagaagggaccgtcctgtttctcgcatggacctagactggagaggggagagagtcgagaaggtggagatgggcagggatatgagaaccttcctccccaggtctcctcttcctgctttctcccatatttgatttttaaatttgtcttcttcctttttcttcactttcctttttattgccgtctttcttcatttacatttacattttcttttttttgtcttcaccaccatgaaaacctttttttttttttgagacaggatcttgctctgttgcccaggctggagtgcaatggcacaatcgtggctcactgcagcctccgcccccggggttcaagtgattctcctgccttagcctcctgagtagctgggattacaggcacacgccaatgcccagctaatttttgtatttttagcagagacagggtttcaccatgtcggccaggctggtctcgaactcctgaccttgtgatctgcccgccttggcctcccaaagtgctgggattacaggagtgagccaccgcgcccagccgtgaaaacccttttattccattttcccttctttctttctgtgcttctcttttctgttagcttctttacgtttttttccatgtcttttcttttgttatcttcaatattttttttctgttttcttcacttgtggctttgtttgctggattccttttttgcttcacctgctcctcttagaaaacatgggtctagtgacgactgtcagtcatttgcctttcagagttctgccatcctcagctttggagccccacagtgctcatgaaacccctagaaggtttggtttaggggagacttttagtaggactgttggaatgaaaaacatcaagggtgaggtagccagcactggaacacctgacaaaggaaaaaatgtcattgcaaatcagaacctaatgatccaataagtatttaatcatagcatcttaagattttctcagttagaaatcatcttaactgtttttactaatatataattcccattcctcaatttttaattccctaagttaatttgaaaattctcttcaatattcctcttaatgtatgacattgattttttttttttttttttgagacagagtctcgctctgtcacccaggctggagtgcagtggtgcgaactcggctcaccacaactgccgcctcccaagtttgagctattcttctggctaagcctcctgagtagctgggattacaggcgtgcgccaccatgcctgactaatttttgtattttgagtagagacggggtttcaccatgttggccaggctggtcttgaactcttgaccttgtgatccacccgcctcagcctcccaaagtgctgggattacaggcgtgagacaccacgcccggcagcattgatttattatacagttactggattaaaaccagtaagagtaggaaaaaagtaaagacacattcaaagtattaaaatcagggtcaaagaagttaaatgggtgagtttttggcatctcttaaagctattgtgtaaatgcagcctcatttaatacttaataaaactttaattaaagcagagccaaaaagtttcagagcaacgaatgaatgaaaaagaaaatctaatcaccaatttatattttatgggcataaataaatttttacaaccaaataacctactaaagatgtttgcaattaggaaattatagcattaagtgattctctaaatgatgaattatcaagagagggcctgaaattgcaaagggagggccaagagtgagtgctatcaataaataaataaataaatctaattaatcaattagattaaataaactaatggtgagagctgtcgtgatgactcttctaatctttgaaacaactgtgaataagctttatcatttaacaacaacaagataatagaataattttgcacagttttcctccaggcttgttttgagaaacccagattaaagtcacaaatcaaaacactaataatgtttcattctggtagccgttggcaagtttgccatatgttaggacacggctctgcagcttggcacaattaccaaagatgtctcagctagatgagcaggggcctcttggacaaaaggagggagaggagtctagaaagttcagtgaagcaagtgcactgtctggttttcacacagtgaacgcataaaaggataggattatacttactttaaatatcccatgtttaaatgacccttattttcattactggttggtcaaaagaaaataatgtgtggacagtcttataataacagatgtgtgaagatgttgatcttgagcaggttggggaatctggaatacaaaattatcctccctgaagagcatagcaagatttttttatcctatgaaagataacatctgtatatttaagttcaaatcttagtgtagtttgtactcttgctttctttttttttttttcatagtctcagtcttatacctgtaaaccattttcagatgatgcttttctttgaaaagatgtttttctccaaaaagccatattgtctttacctgtgtaagttagactttatcagtcaaccctggaatcactgataattcttgttcgcacattgaccaaatatggaaggaaatgggtaaactttgtttattttttgagacggagtctcactctgtcacccaggctggagtctagtggtacaatctctgctcactgcaacctcctcctcccggattcaagcgattgtcctaccccagcctcccaagtagctgggattacaggcacgcaccaccatacccggctaatttttgtatttttagtagagacagggttttaccgtgttggccaggctggtctcgaactcctgacctcaagtgatccacccgcctcggcctcccaaagtgctgggattacaggcatgagccaccgctcctggcccaaaaaacgggtaaagaaactggtaaactttgacaccatgttaaaataattttccctctctggtgcattttgggataagcctgatccatacatagggacatggttctcacccttggcttttgactcattcctgggttagagtgtcagttcattacttgcttttctattggctcctttcaaagctttctcagctaagtgagcaggaactcctttggatagaaggattcttgtataatccagcctggctggtgtgacatctgtgtggtgcccccagacatgagctagcagtgccactcctcactgaggggtctctgcggtgctgcggctggggcagagtctaagctcggctagaccttaacacctgctatgcatgttgttgtcatccaacttgactgacttttctttcacccctctctacccaatctcacggggaacaggtggcctgatgaactcttggaaacgccgctggtgcgtcctcaaggatgaaaccttcttgtggttccgctccaagcaggaggccctcaagcaaggctggctccacaaaaaaggggggggctcctccacgctgtccaggagaaattggaagaagcgctggtttgtcctccgccagtccaagctgatgtactttgaaaacgacagcgaggagaagctcaagggcaccgtagaagtgcgaacggcaaagtaggttgctaagcctggctgtggcccgatgggttgctcatggtttatgctggtggtcatagagccatgctgtgcaagttccttgcagcggcagtagcctgtagcaggtgtcctgatagttcagttcagtgggttaaattactaggaaactgggaagcaagacttaatccgtgagtactttgctttttgtgattacactcagacatgtggctgtcatttggaagatggccagccaattggatctggaagttgcctggtggaagcggaattgaatgtgtggaggaagaatggtgtgaatttggaacaagtggctgagtctttttatgggttaatgtatcactttcaattccttactccagctgttgccagcagataaattagctaaattaaaagcagacagactggaggagttttccgaaataaatcacttctcttctgttataccagtgttggttatactagccatccccattcccagcagtgagaggaacagggctggtcttcaaatccaacatgcccccttttctgccacacccttatagaaccaaagctttggactattgagggcctattatttttgttaaaagactaagtaatgtttccagaaaattgttgggagttacaagcagctggttttctggggtaactagatactaagcctgaaaacatgtttggggataacctgtagccgtactccactcaaaactgagtgacctcaaatatttagaaaagtagtaaaataatctttgagggatcaaattaatgcctgaagtcaggagccttaaaagtaaaatgtttctaatcagccagcatccgcaacttcagaaaagtattcattgtaaagtggaaagttaaatgaggagaagaaagtcttttatgtatttgattgtaagggaaaactcatgtctctgcagacggcagaatattggacatttccaggctgtccctttggagttcatgaggtgcgggagtgcgcttgtgagaatcctgggtctgaatcctgcaagggttcacagcaaggcatggctctgttgcctctgccatcttctctcagcctcacataccgtgatgttcctcatctgtctatagatcaattgattgactgacagggtctcactcccattgcccaggctggagtgcagtgacacgatctcggctcactgcagcctcaacttcctgggctcaggtgatcctcccacctcagcctcccgagttgttgggactataggtgtgtgccaccacgccaggctaattttttgtattattggtagagacggggtttcgccatgttgcccaggctggtctcaaactcgtgggttcaaagccatccgcctgccttggtctcccaagtgctgggattacggccatgatgtttctctttaattatcccatagaaggggccacaagcaccaagaagctgtgagagagggaggcatagtattgaatttcaccagagtacattgatgtatgtttcttttgcaactcactttgtatgctgcttaataaaagctctattcttaggtgcttcatcagaattatactgagttatggaaatgttagctcttattcagccatttctgtcacctcctatagaacaggaacagtgagttattatggaaaacttcaatcatgggcaagagtgggtggaagaatataataaaccacggacttattccagagctttcggtggctgtccacccatggccaagagtgtttcatccacagttctatccagtccgctcccccagcaaaccacctccttttatagcaagtccctatcatataatttcttctgtaaatatttagtaggtatttaaacattctaatacataatcacaataccattatgacattaaaaaaataatgttagctcctaatattatccaaactcccagtcattgttcagatttctgcagtggccttatttttttatttttatttttatttttttgagaccaagtctcactctgttgcctaggctggagtgtagtggcacaaccttggctcactgcaacctctgcctccctggttcaagcgattctcctgcctcagcctcctgagtagctgggattacaggtgcctaccaccatgcctggctaatttttgtatttttagtagagacagggtttcacatattggccaggctggtctcaaactcctaacctcaggtgatccgcacacctcagcctcccaaagtgctgggattacaggcgtgagccactgtgcctggcctgcagtttccttataagtggaggtggtagtgttcttgttggtttgggttggttttatagttattttcttcaagtcagaatccaaatgaggtctagatgttgtcactggtttttagatcactcaagtctcttttaatgtatagatgcccctctgcctttctttcacttgctgtttgtaatggaacatgttagctcgcttatcccatggtttctagatttcaccaaccctatatgggcacgtgtttgaacgtgtttctctttctcatttgtttcttgtgaattggtcattagacctagagagtgatcgagttcaggttttctttctgtttaagagtgcttcacttgtgttggtattgatttctgttaagaaggcttagagtagctggttgtcctcttgtgatgtcagcagtagttctgatcttgattttttttttttttttgatacagagtctcgctctgtcaccgaggctggagtgcagtggcaccatgtcggctcactgcaacctctgcctccagggttcaagtgattctcctgcctcagcctcccgagtagctgggactacaggtgtgcactaccaagcttggctaatttttgtatttttagtagagacgggatttcaccatgttggccaggctggtctcaaactcctgacctgaagtgatccgcctgcctcatcctcccaaagtgctgggattataggcatgagccgccacgcccggccccgatcttgatttttttttaaatatttcatctcagtgattctagctatgaggtcagataatacttattttctaaccagactattttagttttgttgctgtaaaatacatgttttattgtgaacatttgtacttttttttttttttttgagacggagtctcactctttcgcccaggttggagtgcagtggcgcgatctcggctcactgcaagctccacctcctgggttcacgccattctcctgcctcatcctcccgagtagctggaagtacaggtacctgccacctcacccagctaatttttttgtatttttagtagagatggtgtttcaccgtgttagccaggatggtctcgatctcctgacctcatgatccgcccgcctcagcctcccaaagtgctgggattacaggcgtgagccaccacgcccggccgaacatttgcacttctttagttatcagagcaagctggctttatgccccaaacccttcttcatcaaacgtattactatctctggtctgatcctaacatctgctgctgttttaccctgattttgttaacctggttcaccaattttatttctctagtgttgtttagggagggttgcagatgagatcaagatggtattgagaccaaacaccccaaatcctgcgcctcactcccagcacccctgatggaaataatgtgcacatctcaagcagaattcagacgcagatgccctggccttaagctgggagagagctgtgatgaattagggaaagagctcacgccgggccaaggttggcttttgtagatttgagaaagggtccaaaggaagttgcaggcaggagtgggggctgctgcccctggcctgtctgggtcctgagcaggggtgggcattgggcagaccagtgtgaggggagagagcctctcccctagagaagtcaggggaaccctgctatccctggccacaccagcagcctcctccctgggcagcagagatgagactggctccccctagagggtgtcttcatcattgctaaaagaaaaaccattgtaggtccctccatgtcttttggtgacgggttccagaaccaccaccccactccccaccccactgcagccatcaaaatccccagatgctcgagttcctgctataaaaggatgtagtcattgcatgtaacctatgcatattctcccacatgcttcaaatcgtctctagattacttacaatagctagtatgttgcaaatgcattgtaaatagtagttacactgtattgttttttaatttgtagtattattattttttaaattggatttttatttttgatctgctgctggttgaatccacaggtgcagaacccacaaatcctgaactcgcagatatggagagccaactgtgtaccgtttcgtcagtaacagacagttcccaactctagtcattggcttcattagttgctttcctcagttattcagaatttggtgttcctgatgtgcgtttgttgcttttgcttctttgcagagagatcatagataacaccaccaaggagaatgggatcgacatcattatggccgataggactttccacctgattgcagagtccccagaagatgccaggtgagtctgcgctgttgactttgtgttacccacatcctgctccctcatgcacaggtgtgagcatcacacagagcactgtttactgtactggccttgaaaaattttaattgactttttttgaagaaccaagagtcatacgagattgatgcacttgtcccttggggaatctttccctgggcaaatgtgttcaagtacagcacagagttcaggatttccagcctccagtgccactagacagatccattgtcacctgtctctcaggctgttactgtcaccggtagcgtgtgtaaattatacagctgcatgaagctgaaaatctaccctctggaagcttctgagctttgaaagtgaatcatttgtgtttgcataaggacgaaaaagggcagggagcagtaactaatggctgtttaagtaactgatagtgctatggcactggggggttttaaagatcttaatattgaagaattcaatggaagaggtactaacttacacagaacttactattagcttggtgcaaaagtaatcacaattatatttcaggctaatattctaaatgtttcatacctaagtatttcaggaagtattctaaatgcttcataaatattaactcttttgattctcttggatcctgcaaggtagacattaattattaccatcatccatactttgcagaataagagactagggtacagagaacggttagtatcatttgtaatgcagtgcaacctcaattctgttgaatggagacattgaacttcttaaaaacatttgctcctaaggagctttaacttttgactgagattagaagagggtggaggccttcattggctggggcaagttgtctgtagcttcctggacttcaggtttccatgctggagtgctgaggagacatagcacaaaattaaggagacttagcatttgctcttcagtgtgatggatcacagggtcaccttgtggatctgacaccgtggaacgtctgtcctgtctattcctgcagcttgtgagtttgtgagtctgcagggttatgctggaggtgtctgagcaatgccagagaacatcttttttttttttttctttttttttgagacagagtttctctcttgttgcccaggctggagtgcactggtgcaatcttggctcaccgcagcctccaccttccaggttcaagcaattctcctgcctcagcctcccaagtggctgggattacaggcatgcaccaccacgcctggcaaatgttgtattttttatagagatggggtttctccatgttggtcaggctggtctcgaactcccgatctcagatgatctgcccatctcagcctcccaaagtgctgggattacaggcgtgagcctcttcctggctgagaacgtcttttaatttacgagggtaacatccaatagccgaattcttcaattctcagccccaagatcattaggaccttctagtatgttctcaggacccctcactaccccttgccctttgaatctttctgagttgatacagtaccatgatagcaacattaagggtaaagacaccagaaaataattcttcccatgggaacaaactaaaacacctgcttagacccataaattctaacacaaactggaaaaacaagcaaacctggaattatagcccatcattctgtctgggactcctggagaccacatgtggttgtttgtggcccagggaatgcctgcagcttttcagctgaattataggcccagcgtttggcagctgccctgtctgttttatgccacgatgaacctgctaaatttaacctttggaatattttagccaaggactttttctcctgaccagtggaacactattttaaaaaaattccttttcagattccaagttatacttgattcaagagaagaaatttataaatttaagagtctaatctagacagaattgaaagtgcaacaaatttgatgcctttgtgtatgtgattcctacaacttgaatgtatgtctttttcaatgtttaatttgggatatttttgagatgagcaaagcaatgaagtcttgctgtttggttaaccagaatggatagtgcaaatttatattaaagtgttttccttgttgtatacaagagatatgcatatctcttgtatatgttgaatattttcaagcttgtagtcacatttttctcccttaggaagcacgcgagatagattttagtgctttgctgtaaatcgtttgcacagcctacctttacatatggtgtcatttttttaacttaaacatgccattggataccaagtacttcccctctgccttaaacagtaggagtatatatatattttgtgtcttataagcccccagcaggagaaggataccctagcgtctctttcatatttgatagcgctcacattttgtagttggtcagtaaatgctagatggatgcatgtctgttcatagtcattttcctgatgctttgttctgcttgatttttcttaagttgacatgttttgtttcgttttgtatttgttttttttgtgaggcagagttttgctctgtcacccaggctggagtgcagtggaataatcgtggctcattgcagccttggccttctgggctcaggtgatcctcctgcctcagcctcccgagtagctgggactataagcatgtaccactacacccagctaattttttatttttcgtagagactgggcctcagtaaatttcccaggctggtctcaaattcctgggctcaagccatcctcccaccttggcctcccaaagtgctggaatcacaggtgtgagccaccatgcccagacacgttttcctttattttctgattgtgatgaggttggatgtgagagtactcatttgaaataaagatggaagagttctctggtcaaaatagttttctactttaaaacagttatttttcatttccaactctcctgtggttttattgacttgagtagaaatgctgttagatggttgaaaaccccatcctgggaatacataacaaaaatagacatctaggccaggcacaatggctcatgcctgtaatcccagcactttgggaggccgaggtaggtgaatcacctgaggtcaggagttcaagaccagcctggccaacatagtgaaacccccccatctctactgaaaataccaaaaattagccgggcatggtggtgtgtcccagctactcgagaggctgaggcaggagaatcacttgaacccgggaggcggaggttgcagtgagccgagattgtgccattgtactccagcttgggcaagaagacacattccatctcataaaaaaaaaaaatagacatctagtggccattccaatatgatactctccattacatgttgagtatcccttacccaaaatgcttgggactggaagtggtgcagattttggagtttggaatatttgcattagacttaccggttaagcatccctaatctgaaaatttgaaatgttccagtgagcatttcctttgagcatcatgtcggtgctcaaaaagttttgaattttgaagcatttcagatttcagatttgttttggattatggatgctcaacctatattgatcttctcaccttaaaatttatgttttaaaacagaaaaagcacctgaatgttccctagtttataagtaatatcttaagtaaggatccttgatataagtattttgggtagaactgaggatttattatttgctgttaatttctcaaggaactcattcatcatcgtcaaatgtctgtaaaggtctatgggacctggagaaaaggccgtccattgacctaaagttagaacataatatagcactaaaaggcatttacacgtactttatctgcttcttctcactttattctttggtaatgaaactgacatttacccctaagaagtaatcaaattaaaagcaaaggtgcttagagatgtcattttcacagagcacgtgcagtagggcactattgctttgccagtacgaggttggcctctccttgacagttgctctctcttccccacagccagtggttcagcgtgctgagtcaggtccacgcgtccacggaccaggagatccaggagatgcatgatgagcaggcaaacccacagaatgctgtggtacgggagcactgtgtgggatgggggtggggcgtctaggggcagggacggggagggcgtcaggatggtaaaaaagggaaagattgggaatttccagacagtctttttttaaaaggtaaatatagaataattaaggagaaaaacaggaccatttgagtttagaatcaatacaataataaatataataagtggtacaatataatacaataataaatacagtaaattaagttggacactgtggctcatgcctgtagtcccagcactttgggaggctgaggtgggaggatcatttgaggccaggagttcaagaccaacctgagaaacatagcaagacactgcctctatgaaaaaaattaaaaattatccaggcatggtattatgggcctgtagtcccagctacttggcaggctgaggcaggaggattgcttgagcctgagaattcgaggctacagtgagctatgattgcgccactgaactccagcagcctgaccctgtctcctaaaaaaacaaacaacaaaaacgaataaattacagaaggttgtaagtagtaatacattccagttctctcacctcaaacctttaaaagaacaaaagaaataatcctactttttatgaagtcacggaagtacacatcacacttactcttcagaggacttggtgaaatctaaattgtattcttattttttttttttgagatggagtctcactctgtcacccaggctgaagtgcagtggcgagatctcagttcactgcaacctccgcctccaggttcaagcaattctcctgcctcagcctcccaagtagctgggactacaggcgcttgccgccacacccggctaattttttgtattttagtagaaacagggtttcactatgttgcccagtctggtctggaactcctgagctcaggcaatccacatgcctcagcctcccaaagtggtgatacaggcgtgaaccactgtgctgggccgaaatccaaattgtattctttgtcttccctctatcccagacacatacacaaagttacaaaaccctgctttggaaatcaagttttatttcctcatcagaaaatcttgaaataaagtttcttaggagaagaagtgtaagatttaattaaaggacacaatataatcaggaaatttgtactattgaaagaaggtcataaacactgttcactgaacatattttaagaataagaggggccaggtgcggaagctcagacctgtaatcccaatactttgggaggccaaggcgggtggatcacttgaggccgccaggaatttgagaccagcctggccaacatggcgagaccccatctctactaaaacacaaaattatccaggtgtggtggcccacacctgtagtcctagctacttaggaggctgaggcacgagaatcacttgaacctggaaggcagaggttgcgttgagctgagatcacaccattgcgcagcctgggcaacagagtgaaactctgtttcaaaaacaaacaaattaaattaaaatagaggtacttgtagaaaacttagttaaaatatttttaaaaacaaagaaataaattattgaaaggttaagaggtaatgattaacttgtaattttaaaaaataaatggcctatagattctgctccgtgtagaggctatttgtactcacacaacagaggagtcgtctcatagataactattattttgaagttaaaaagaaaagagccatttctgtctgattgggagttgtgggctagaggtattactgtagtgtgcaccctactttagtgcttctctcattctgtttactttttgttcttttccagggcaccttggatgtggggctgattgattctgtgtgtgcctctgacagccctgataggtaagctcagatgtggctcttaacaaaaacagctcatcacctgtgtgtgtccacaggtgtctgtgctgctgggtcacgaccctcttcacagggctgtgaaatcacgcaaggctgtgtgttcccaccttgtcaaccccagcaatccagtcttccttcttggtacccaattttacatcacctggaagtctccttctctgggtatctttggagtcctggggaaaaccgtgggaacctggacaattttaaaaagcatgaggaatatttttaatgtgtatacagggacaaacttgggatttatacaggaagaaaatgcctgtttaggaaaatgatattccagcaaaggggaagggagtcattctcctttctgaacttaacgataaacttgaaaaggattttgatgataatgtatatgtagagtattaataaaccacaaacattgattttccttgacatttcttctttcttggcaccctttttggttttgatttttgaaggcaaatcatctttggagatgatcttacgcgtctttgtgcccagtgaacttcatctttattgtctctgtttttctgtattatcttgtaagttctacttctggcctgcagcagaatttaagaaaagtttctctaggacggaccagagaaagaatcaaaattgtcttctgccctcagtaagatgctggaaagtgaatacgagtgtgttaaaattgacaacaaaatatagtgcctccttggcagagttagagtgctggggtctctgtcagtcaccctcccgttgacaagagcccttctgaaccatgggtcctttgtttttagtagtcagcttgcaccccttataactggctcaggaatctttaacacgtatgtgtcatatccgtaatcaaagccctggtgcttcttattctggtatgtgagtttctaccttaccttctccacatctttactctcccaagcccttcactcctccaggctgggcatgtgatgatccatccttagaattttgcatcctcattcagggttttctctcttcctcaactggccacttttctcccttgccaactatagaaaaaggctttttttattttttatttttaaggggcacctcaagtttagcctgtttgcatagcttttcctgtgtcctgcagtccagttactctttttcttaaatttttgtgtcacctaactacagtgaacatttgaagacttgcaagaaagagttcacattctctagcttaagccgttagatagaggagttagtatttatattagcaagggcctatgagagaggttcagggcatttccagacaaaaagaggtgagggagaaagtaaatttccattatcacgttatccgtgactaggaaatgcacccttgttagatcactttggaaacccggacccaggtggctttttgtataaagcgtaatcaagcatttaagatgctccacctacacctatttactgatcctcttttattgctggtgtctgacatttcattaccaacccacagaaatattacccaaggcaggaagaaattgactttggagaggcatcaaaaaaaaattttccctcatggtcaccttgtttagccttcccggaactgagtttcatctggaaagttttgcatgaagaaatgttttcccttccaggaccttcagaatgaatgtgttgctccaagtttaaaggttaatgatgcgtaaaagaaattctgcagaaatgagcaacgtttgccttaataaaagcacagatagcctagcagtgtatatcccgtgacccagaagccaggaagaaggcactgagtctcggttcacacagaggtgatgctgacggtagggctaaggggctttgtttccttctcatcttgtggctcagacccaactcgtttgtgatcatcacggccaaccgggtgctgcactgcaacgccgacacgccggaggagatgcaccactggataaccctgctgcagaggtccaaaggggacaccagagtggagggccaggaattcatcgtgagaggtgactgcctgccctgcttcctcggtctgcttaacagactcccctttccatttgcatatagacatctgcagcattttcatttcgagctgcttttcccagtcattttaactgttggagattttgtaagtgatttttaatttgtgatattataaagtgtttctagagggtcatgttttttgttgctagttgtgattttgggcttttctttcatgtagtcgttccatttacatcgggttggggtgttcgtggtctttttctggcaaacagctagaaaccccacccatgtgttagcattatgcagatgattgtgtggtctttggggtttctcctcacagattttaatttacactttaatctttttttccaggatggttgcacaaagaggtgaagaacagtccaaagatgtcttcactgaaactgaagaaacggtggtttgtactcacccacaattccctggattactacaagagttcagagaagaacgcgctcaaactggggaccctggtcctcaacagcctctgctctgtcgtccccccagatgagaagatattcaaagagacaggtaaccaggctggctgcccgaaccctgagcatcaaatcttaaagtctgggcttgctccgggcaaaggaataagattccttcctagtgtgtactttatttccccccaaagaagttgtcctcttggtttatcttctaagcctgtctggggttagctatgtgaccacttagtgtttaagccgtactagaggtcgattcatggagtggtaggaagattctcgcaaggacaagaaaatgtcaacagatgcagggcatcgtacgggaagcttggttttcatatactgttttcatccttttaattttcattcttctcatttttgagacagggtctcacactgttgcccaggccggagtgcaatggtgcaatcttggttcactacagccttccagggctcaagcaatcctcccacctcagcctcccgaggagtagctaggactacaggcacgcaccatcacaccgggctaatttttatactttttggtggagaccaggttttgccatgtgggccaggctgttttccatcattgtacgatgagcgtcctatgcaacctgtaaaagataaatcctgactgtccatgaacttagcctagtagcatagaaagtacacaggtaacttagagggtttcttgtaatttttgtagtattatgaaagtgtttccagaagatggcttattttgatttttgttgctggttgtgatcttgtgcttctgtgtaacacagttgttccattcgcgtcaggtttgggtgacggttcggacagcttgcctctgaactcacacactgccaggccaagtgctgtcttctgaagggagaggctaaagaaaggaaaggaagaaataggaagtaagaaggaaagtcagaaatcagagagagttttcactcctgttccagagcccaaaaagagacattaacttacccttttcccttccagagccagttatcatttatctttatatatttaatgatgggtttattgttctaatactcatctccccatctcagctgtaaatgtcacagtgcaagagacactttttttcttcatcactagatacctagtgcagggcaggacaggacacatgtaggaattaagccagtgtctattgaattgaataattaaagggactgaggtcagagaggacacaggcattgcctcagtccccgaggttggcgttgacgtgcgtgtgctgggcacccctgccattgcaggctactggaacgtcaccgtgtacgggcgcaagcactgttaccggctctacaccaagctgctcaacgaggccacccggtggtccagtgccattcaaaacgtgactgacaccaaggccccgatcgacacccccacccagcagctgattcaagatatcaaggtaagccaagacaagcccatcaaggtgggtgattacagctcagagattctacccttagagcaccaagacctcagcattagtgaagctcaattttttttctgtaatcaaaactagtgcttggttggccggcacggtggctcacgcctgtaattccagcactttggaaggctgaggcaggtggatcacttgaggtcaggagttcaagaccaacctggccaacatgatgaaaccgtatctctactaaaaatacaaaaattagccgggtgtagtgacgcattcctgtaatcccagctacacaggaggctgaggcagaagacttgcttgaacctccgaggcagaggttgcagtgagcagagatcattccactgcaccccagcctaggtgacagagtgagacttcgtctcaaaaaaaaaaaaaaaacacccaaaaaactagcgcttggttaaatttgtgtttgagtaccctgctttcgggaatctaaatgagaaactttagaccaaaaatgttttgtctctagggaagtgttagacattttcgctgagtcacccgatcccacctgttgggttctgtgggcagaaggatgaggtctgcagcttgcactgtggggctccctgctcatggggatgtggtgacctgcgtgggggaccacctgctttgcgtcaggttctccctcagcctcagttggagaccttctaggagtaaccggctagttccactgtcactgtacagtttccagaccacacgagtgaattcccaaggagcccagggtggtctagaagaacacttggcatccctctcaggcacgtgcaaacttccagaagctcctgagtctctctattaacaccgagcatgttacattacaaattgctgtttataagtacgtgtagtcgctcagtaaatctatgtgagatgaaggaatgaatggttgcatggcagccctgagcggggattcttaccctcactttccggaaatggaacggtgacgggggatgttctggttgcactgcccacgtagccggtcagtcccgggtgcagaaccaagtcaagggagactgctggccctccaagcagtcctgcaggcagattcccagggcaagggacagagctggggctgtgacagagaaggtgctagaatgatggtgaggcaggtattttactgatggacggcaaaggaaattagctaaccagatccaagagggaactcagtttttgtggaggtgggagaggatctaatccatcagtggtggataattttccatcaaaatcaaattggcctcctgattccaaagtggtatgttctctgggtgtttaggtgtttagaaccagattctggcaagccagttgttttttgtttgttttgagacggaggacggagtcttgcttgtcacccaggctggagtgcggtagtgcgatctcagctcactgcaacctccgcctcccgggttcaagcaattctcctgcctcagcctcctgagtagctgagattacaagcacccaccaccacgcccagctaatttttgtatttttagtagagatggggtttcaccatgttggccaggctagactccaactcctgacctcaggtgatctgcctacctcagcctcccagagtgctgagataacaggcatgagccactgggactggccttgagccaccacacccagcccagttggaaccagattcaggttgttttccatgcaagccagggcactggctacacataatttcatttgtagccttaaaaattattttttgaagatttcttctgaaaggagtaaaactatcatgtatcagccacactcagtcttcggtgctggaacttacctgtttttgtattcttcagtttgaattcagacattaaaagagtacataggatttttcagctgggcatggtggctcatgcctgtaatctgagcactttgggaggctgaggtgggtggatcacctgaggtcaggagtttgagaccagcctggccaacatgatgaaaccctgtctcttgtgaaaatacaaaagttagctgggcatggtggcaggtgcctgtagtcccagctacttgggaggctgaggcagaagactcgcttgaacccaggatgcagaggttgcagtgagccgagatcacgccattgcactccagcctgggcaaccagagcgaaactctgtctgcaaaaaaaaaaagagtaaatatgatttttcaaatatgaagccatgcttcttaagaaataagttggccgggtgcgatggctcacgcctgtaatcccagcactttgggaggccaaggcaggcgggtcacgaaatcaggagattgagaccatcctggctaacacggtgaaaccccatctctactaaaaatgcaaaaaattagctgggtgtggtggcaggcgcctgtagtcccagctactcgggaggctgaggcaggagaatggtgtgaacccgggaggcggagcttgcactgagccaagatagcgccactgcactccggcctgggcgaaagagcaagactccgtctcaaaaaaaaaaaaaaaaaggtcaagttaccctaaataagtccataaaattgtttgaatcaatttgaatttagacattaaaagagtaaatataatttttcaaatacaaagccatgcttcttaagaaatgagtcaacttaccctaaatcagtccatataaattatttaagtaattaaaaaatttttatggccttcaattggatattactgaaaaagttttatagtggaaatgaaattaccacgatagaatgattcattacctctcctccaacttttctgtttatttaaggttctaaaagtaactttgtttttttcatatccagatgaccattttaggagcataggtacatgatgaagaaattccgtgaaagactttcttaggtttcaagggtggcacgtggaaggacagtctccccaagaatatattaatgtgtgtagttttcaggtatagagagaatagaaaacagcaattcaagaactagcaaaatgtgtttatgaaatgaactatagataaaaataacatgatttagctactgatggctaaatcaataacagaagatcagattaattttttttattttgctctcttattttttatagagacagggcctcactatgttgcccaggctggtctcaaactcctgggcccaagtgatcctcctgcctttggctctcaaaatgcacaggcatgagccactgtgcccagcctaaatttttttttgagacggagtctcgctctgtcagccaggctggagtgccgtggcatgatcttggctcactgcaacctccgcctcccgggttcaagcaattatcctgcctcagcctcatgagtagctgagattacagctactcagccaccacatccggctaattttcatatttttagtggagacagggtttcaccatgttggtcaggctggtctcgaactgctgacctcacgatccacctgcgtcagcctcccaaaatgcggggattacaggtgtgagccaccgtgctctgctgagatgaaattttttaaatgtatgtaatctccaggggagaaaatttaaaatcacatggggaagtacacgcacgagaaaataagaaatgagctgtaagaatgtatttttgtgatttgtcttcaaacacagattatgggtatcttcgtccatgaaaccacctaacactggatttccaccatctttgccccactaggtttatggatatttgagagtcttgaaaaatatttatatgtaggaaaatacaggtttcttacaataagcttgcttgctttatttttaggagaactgcctgaactcggatgtggtggaacagatttacaagcggaacccgatccttcgatacacccatcaccccttgcactccccgctcctgccccttccgtatggggacataaatctcaactgtaagtccagagctccaccccgactcctcagagaccatgattccacttgccctgctaactctttagcttaacacagaagcatttgtttttatctcaaagactctcttattcgtcgtgaattggaaggaaaagatgaaatatacttagattcattattaaagcaagacttctagagtgtggttgtagtaatgctaagattgattgctgtagtaaaagaagagatttaaaggagtcagaaaatgccagctctccccatgaactgagagtagccttttgttttgtttttgttttttgagacagagtcttactctgtcactcaggctggggtgcagtggtgcaatcttggttcactgcaacatctgcctcccaggttaaggtcgttctcatgcctcagcctcctaagtagccgggattacaagcacccgccaccacatccagctaatttttgaatttttaatagagacagggtttcgccatattgcccaggctggtcttgaactcctggcctgaagtgacccacctgcctcggcctcccaaagtgctgagattacaggtgtgagccattgcacctggccgagtagccagacaaccagatcctaagtaattttgcattccaaaaaaggattttgttcagcaacagattaccttttaagtaagcattttatgtggtaagaagttcaattagataacaaaacagtgtcaacttacccacctctgtgcttttagatctgtgttcaactgattgagatgtatagggagtgtggtgggcattgcatccgtcctcctcatttattcctttgtcttgactactgctccgattatgctcatgccctattctgaacccctcagatgagttccgtgtttgttttgcttgtcctagtgctcaaagacaaaggctataccacccttcaggatgaggccatcaagatattcaattccctgcagcaactggagtccatgtctgacccaattccaataatccaggtcatcctacagacagggcatgacctgcgacctctgcgggacgagctgtactgccagcttatcaaacagaccaacaaagtgccccaccccggcagtgtgggcaacctgtacagctggcagatcctgacatgcctgagctgcaccttcctgccgagtcgagggattctcaagtatctcaagttccatctgaaaaggtaaagcatgggggcacgggagatgagctgggcagagctgcttacacaggtggggcactgggtcctcgttcagataaagaggcttttgaacagaagacacctctagtaggacagggacctctgggtcagacttgtgggttgcctgagcaagcttagagaatgctgccatcctttttaagtcacacaaggttatttcagggaccaagtcaccgttggtgtaatgtcctaatgtataggacattggatcaattaattaccactgctctatatttaaaaaaaaaaaaaaaacttggatatttgttccagatcaaagagatagaaacaatctaattgagattttgattagctatagaaaaagaagtgtcttttcttttctttttttgagacagagttttgctcttgttgcccaggctagagtgcaatggcatgatctcggctcattgcaacatctgcctcctgggttcaagcgattctcctgccttagcctcctgagtagctgagattacaggcgcccgccacaacgcctggctaattttttgtacttttagtagagatggggtttcaccgtgttggccaggctggtctcgaacttctgacctcaggtgatccacccgcctcggcctcccaaagtgctgggattacaggcgttagccacggcgcccggccaagaattttcatatgataggatgaggcatgactctttcaagtattaacaacgctgcagaggtgagttggcagcacagttgctcccagtgagacattggctctttaggggttttttgtatttaaattgaactgcacaaaatgaagcgggcccttgccaagaagtcactggtgcttgctccattcaccagtgggggaccattcactgctttggtctacagaaccttggcacagcctagttcctcccagcagccagcccccatcagtctaaaaattaacagttagtgtttgcctcctaggatacgggaacagtttccaggaaccgagatggaaaaatacgctctcttcacttacgaatctcttaagaaaaccaaatgccgagagtttgtgccttcccgagatgaaatagaagctctgatccacaggcaggaaatgacatccacggtctattgccatggcggcggctcctgcaagatcaccatcaactcccacaccaccgctggggaggtgaggagaggcagctgctgcttgttctgttagatgcctttgctgcagatacacctgcgtcaggaacattgtgcagcattagagtggctgtcctgcacagttgcagtttgcttagtacagctctcaatactaaggaaatgcatgtaacccagaagcaaccacacgaatatagagataaaaatatatatattgagtggaaacacagagataaagtacctgagacataatcttgctaatctgagaagcagctgagtgtctagcagagctgcagacctggctcaggtccagccactttgatgagggtttattgcagtgcttctgcaacaaagtgtttgtttgcacgtgactagctagatgaatatcagatgaacacattttctttttaaaatttgaacttactattataaaaccagttggccaaaagggtggtaatccaataaccaccaccccgacccccaccccccaaggcttcttatggaaaaaaaaaaaacgtcatctggagtctctgttgttccttggagttcataaatttatcagccaaaagacaggactgaagcttttcacccgcttttcctgttaatataggtttgcaagaaatcagcccagcatctgcctctaccgatgggcaaaataccctgagttattttcagcaagaaagagataaacctaatctcaagagaacaaagggaaaatagtacttttgaaattctgggatgaccacacgggtaacatttttaggaggctggagacgcccttgtgccagcagctccctctgggatcaggtgatggcacgttctgggaacacgtgttggggccgcagcctgtggaactgaagtccccctggtgtgtcttccaggtggtggagaagctgatccgaggcctggccatggaggacagcaggaacatgtttgctttgtttgaatacaacggccacgtcgacaaagccattgaaagtcgaaccgtcgtagctgatgtcttagccaagtttgaaaagtaggttccttttccctactgtgtcagaagagcaaataagagaaattgcagagcagggttcagggtttgagcttcccattccatttgtggcttcacgctgtattggagttagttttattttacctgtgttgatgcctgtttaactttgcatatccgctatttttctcgattcctagataaagctacggtcttacgtgatgtaacttgtcagtggttttttaccccattccttttctcagttccatgttggacccgtctgggtatttcttgattttttaggtttccagttgtcattagctttgaaattgggctgattgactgaagccagcttataaactctttaaactatgtgttatgtctacaatgtaaaatggacctactttttttttttttttttttttgagatggagtcttgctctgttgcccaggctgaagtgcagtggcgcaaccttggctcactgcaacttctgccttctgggttcaagcagttctcctgcctcagactcccgagtagctgggattacaggcatgtactaccacgcccagctaatttttgtatttttagtacagatggggtttggccatgttggtcaggctagtcccaaactcctgacctcaggtgatccgcccacctgggcctcccaaagtgctgggattacaggcgtgagccactgcacctggcctgtagacctacgctatttgatctgtgacttcatatcctcgaagtagcgcgaaggtattcctgcttagtataaacacagccctcatacaagagtattcacatcaatttttataaatgttatcataatgtatctgaggcttggtaaaggtaataaagaaacaggcttttgtttcttttcttcccgtggactcagcataatgcttagctggtactaattcgaatgcggctctctgaaaacacttgttagctggttaaactaggggctgcctgtttgttttcttaaagcaaaatcaggatgaaagtacgttttttcactctgtttattcctctatccccatctctatccactgttttctgggcccggacagaatgtctgtgtccttagaatacaccatgtaaagtcaggtccctgcgggtcactgaaggcccttctcgttcatattctgagcctctcttgactcctctctgtaggctggctgccacatccgaggttggggacctgccatggaaattctacttcaaactttactgcttcctggacacagacaacgtgccaaaagacagtgtggagtttgcatttatgtttgaacaggtaaaaggaatagttagaaacagatttctttgccggcaagcaagggtgaaacctgttaatacttagccttgtaagttaactggtacttagaaatgaggcacacctgtggatttcccagcaaagacaagaccagctgctctttcattcgtttgtagaatgaaacctgctacacattttatttgaacctccgttccagggactgttctagttgacaggagagagagcacaaggaataaaatatgtgacgtgtgttagatggtatctgtgctagggagaaaattaaatttaaagcagtgagccaggggtgagggtacagttttagccagggcagtcagggaaggtgagtttgagagaaaccctcatgaagtgagggagcaagcgacgtgggcatcccatggcatggcagtgcgttgaccggaaagctgttgactgtctcctttcaggcccacgaagcggttatccatggccaccatccagccccggaagaaaacctccaggttcttgctgccctgcgactccagtatctgcagggggattatactctgcacgctgccatcccacctctcgaagaggtttattccctgcagagactcaaggcccgcatcagccagtcaaccaaaaccttcaccccttgtgaacggctggagaagaggcggacgagcttcctagaggggaccctgaggcggagcttccggacaggatccgtggtccggcagaaggtcgaggaggagcagatgctggacatgtggattaaggaagaagtctcctctgctcgagccagtatcattgacaagtggaggaaatttcagggaatgaaccaggaacaggccatggccaagtacatggccttgatcaaggagtggcctggctatggctcgacgctgtttgatgtggaggtgagaactggctgccgtgtgttggggtgggctgggtgctggcatctgagaacatggatcacggccaagttcatgtggagagaagacaagatggagcattttgctctctcaacctcttttattcgagcccccagaattgtaccattaacgcctcccttctcctcacagtttctcttctcctgtgtagtaaatgcatctgtaatattaggaatgaatgcaaaattaagatgtcatctattcttctacccttccttagggaagctatagatctaattttttaaacactgataaaaatctacatttaaaaaaatgttatagctgtatatacaaattagaaactttggatatacttgcattttactttgttttttctttacagccatctgtttgaaaggaagaatgtctatctcgtaatggaatttagccattggcatcaacccagtactgatttttgttttgttttaagtagaccgcttattgaaaagaaatcttactaattgtctagatgagagtttggcaaactggtctgtgggtcagatcttgcctgcctccttttttctaaacaaagttttattggaacacagccaagctcattcctttagatatattccctggctgtttttgtacagagttgagtagttgtgacagagaccatgtgatccacaaagtctaaaaatctttactatgcagcccttaacagataagtgtgccagctcatcgtctagattagcttccattttttatgatcacagtaattcagcgtatatctgatgactttatattgaggctgtataaaattctaaatattataaattctagaatccgtgggtggcttttcattaggtgatgtttttgattggtttggttggttcaattatgcctgtttttaagtataaaaaaatcaggtgctttgtacaaagccataattccatttctccctgacaaggaatagataatagcagttaaactcttggcttcctgcaaaacgtgagctgtgaattagcatagaaagctactggcttggccgggcgcggtggctcatgcctgtaatcccagcgctttgggaggccaaggcgggcggatcatgaggtcaggagatcgagaccatcctggctaacacggtgaaaccccatctctgcaaaaaattagctgggcgtggtggcatgcacctgtaatcccagctactcgagaggctgagacaggagaatcgcttgaactcaggaggtggaggttgcagtgagccaggatcacgccactgcactccagcctgggcgacagagtgagactccgtcaaaaaaaaaagaaaaaagaaagctactggcttttgcatggaggatgcagagaatgtctggttattagggatataaactagagactcttttcagcgtctccaatttatagccctcct

SEQ ID NO: 2018 - DNA, 207 bp, Homo sapiens
aaaaaaaaaggtaataacaaccttcaagagccccttcatctcaactcggcataaacaaggcaagattctgagagtggccgcccctggaagcagaaattattcttgtggctatccattggctcctgaggctctaatcagagatggggcacctttagtaccaggggagtgactgttgcccataaggtactggacatcaactttcaagag

SEQ ID NO: 2019 - DNA, 254 bp, Homo sapiens
cgcccagccaactctgaagtttttaagtaggtctgtggtgctgcaggttatggtaaaggagaaagggggcaaggggaggaaaataaagaagctataagcaagaactggaagagacaaaggacggagggaaatttagatccttggagtatatggaagcatattataaactgttacattatgtcaggggttcgagtgcctgggaatgttgttgagacaagaatacattgtctgtgaagcattgcagaagacaactg

SEQ ID NO: 2020 - DNA, 402 bp, Homo sapiens
taaagaaacttgttttccaagttctttaatgtttcagctccacctacctaactgcttcctccttgctggcaaaactggcatgtagcccctccagccattactcatttttcactcccaggtctcccttcccattctccagtaccagcaggcagcacaaaagggctcttggaattagcatcttgagaaaattaggttgatataatgttgatttaattttctgagctccaaatgatttcctttaaacccctgcctggcagaggagctctgtcaagctgatgggaagtcacagtgtcttttttggcttttgtatacaaatgcctccagcagctggtatctggttattgccttttgctgtcatgaaaatgaagtaggcaccagggttgtaccattcaggttgagggt

SEQ ID NO: 2021 - DNA, 358 bp, Homo sapiens
cttgcttttccctctttgcagtatgtgtagggctaaaacttgtgacccctgccacattaccaccatgctgactcgaagatgctacataatgttcttggcaaataccattaggtcttttttgtgtgcaaatgaatataatccaaaaagatgaataatcgatggctcaggaacaaagaatgctggggcggcttagtaaggaagtggggaaagaacgattaagacccagcatgcctggagtgggcttgtcacgggatgatgacatttatttttagctaaagtcactttctccagagactttttcactattttgataaagccagatagctatcatcagaagaaaggcccacctcacctagaa

SEQ ID NO: 2022 - DNA, 399 bp, Homo sapiens
aaggtgtccaagctatagaggcaaggcactattctaaacagtggtgatattaaagagaccataacaggcacaaagtcgtgttttcatggagcttatgttttcgggaggaagcaagataaatgtaattagtaggtaaatcatatggtatattagaaggtaataagcacgtggagaaaaggaaatctaggaaagggagatggggaatgtggtttccattagaaataaggtaatcagcataggccacaaaacaaagacgacatttaaacatgtcaatgagaaagaaagcccaaagatcacaactggaaagagctgaagcataaggggagcgttggttgatgaaattgttggcagaataaggatagattgcagagggcctcaaatgccaagctagggagtttg

SEQ ID NO: 2023 - DNA, 326 bp, Homo sapiens
aaggtgtccaagctatagaggcaaggcactattctaaacagtggtgatattaaagagaccataacaggcacaaagtcgtgttttcatggagcttatgttttcgggaggaagcaagataaatgtaattagtaggtaaatcatatggtatattagaaggtaataagcacgtggagaaaaggaaatctaggaaagggagatggggaatgtggtttccattagaaataaggtaatcagcataggccacaaaacaaagacgacatttaaacatgtcaatgagaaagaaagcccaaagatcacactggaaagagctgaagcataaggggagc

SEQ ID NO: 2024 - DNA, 108 bp, Homo sapiens
ccttttttacggctggatagtattccatggtgtatatgtgccatattttctttaaccagtctatcattgatgggtatttgggttggttccaagtctttgctattgtga

SEQ ID NO: 2025 - DNA, 435 bp, Homo sapiens
ttcacaaaagagaccatactaattaccacttttccactgagtaagcccaggtttgattactttgaaaatacttttaccttgaggatttaaaaaaaaaaaaaaactttcttaaaacaagtattcaaatcttccctcgttgaggacttagtgatgaatattgaactttggaattatgaaactttcatatagaacagagggagccatttttagtttggtaattggccatggatataaggaaaatgactgtaaaagaaacttttgaaatcaactataatccagtgatagaggttttttctggaattccataaaaaggaaagaaggataagatcctcatcaaattgctttcagtcttctgtcttatgagtgcagtcctattatcgctcccaattctgtttaatataaggtgattcattaatgccaagacataaactatga

SEQ ID NO: 2026 - DNA, 434 bp, Homo sapiens
ttcacaaaagagaccatactaattaccacttttccactgagtaagcccaggtttgattactttgaaaatacttttaccttgaggatttaaaaaaaaaaaaaactttcttaaaacaagtattcaaatcttccctcgttgaggacttagtgatgaatattgaactttggaattatgaaactttcatatagaacagagggagccatttttagtttggtaattggccatggatataaggaaaatgactgtaaaagaaacttttgaaatcaactataatccagtgatagaggttttttctggaattccataaaaaggaaagaaggataagatcctcatcaaattgctttcagtcttctgtcttatgagcgcagtcctattatcgctcccaattctgtttaatataaggtgattcattaatgccaagacatacactatga

SEQ ID NO: 2027 - DNA, 108 bp, Homo sapiens; identical to SEQ ID NO: 2024

SEQ ID NO: 2028 - DNA, 399 bp, Homo sapiens
aaacagctaagcagcataggaaatgtgtgcattgaacagtgcaaaggatgtgcaaccaaaacacaagcattgagcaagaaagatagggaagatgtagtaataaaaggatcattattagttgaatagcagaaaaacatttagagttgggttttttgttatttgctggaaaatactacctaatgtaatttattactgtatttttatgtcatacatttttgacagttctgtcatgtttttggaagttagtgtcactgtctactcctaccccaccatatacacacacacacacacacaaataccatcaccacacatcatgggaagctggtggggaatatgccatttcattaatttctccccaagcttcatcccaccccatgaaacacagaccatacttttgat

SEQ ID NO: 2029 - DNA, 399 bp, Homo sapiens; identical to SEQ ID NO: 2028

SEQ ID NO: 2030 - DNA, 655 bp, Homo sapiens
ctgctgcacatatttttgataattaaaaacgaggatagcagtctttttacatgttgataaggttaatcaaggcaacgtcattgcagttgtcaaaaaatcctgattattctcctgcactccattcattgtgaatctttgctttgaacacaggggagcttctggacctacaggtacaactataatctgattatgtgtttttctacttgaagagactacgtttttaactagtaaggcttaagacagatttcagtttttattaattctcaagattaagaacagatagcggcaacatgtcatgagtttcattaatgcaaaatgggaaccaaagttttgttcttatttttaaaaataatagtgataataataatataactaggcagtaaataaataaaaaatctgaatccagagccctttgttaagtaaaacataacagaaagaaatcagggtagatgccggccaacattcggattaataaagtgtgaacgtaccactcttgcatgcagattagcaagaattagcaatcatatagatgagtatagtaagttttaacctatttgctgttaccctcccaaatcctattttgctcagggcacacctccattttacaactagttaataaagaatactataatttaaagttcatgtttctatggta

SEQ ID NO: 2031 - DNA, 655 bp, Homo sapiens; identical to SEQ ID NO: 2030

SEQ ID NO: 2032 - DNA, 296 bp, Homo sapiens
gttttatatactgatcacatttggggatttttatatttttctctagattgaaaatagccttattgtttcattcttattatataattaggatgtgtttattctcagagtttccagagactgcagagtagtatgaagaagaatgtaaaaatcatttatgatcttgctatccagagataatcattgttaccatttaataagctatgcctttcaattttttcctctgttcattcattatatgtgatttttttttccctgcctaaaaagtgatcatgttcatagtccgacaataacaacaa

SEQ ID NO: 2033 - DNA, 296 bp, Homo sapiens; identical to SEQ ID NO: 2032

SEQ ID NO: 2034 - DNA, 4548 bp, Homo sapiens
aaaattagaacagatggacgcagaaaataaagagcttgagaagaagctggcaaaccaagaagaatgtcttaagcacagcaatcttaagtttaaagagaaatctgcagaatatacagcattggccagacaactggaagctgctttagaagaaggaagacaaaaggtatgcatggcctttatttagaaactttttaattcatttaccaaagagtcatctttttaaacatcttgcaacctgtagttattgtttttgtcctgatgacagggtgaagggagcaattacatttttcttctttaactatcttccttttcaagcaaaacagatacattgctaggctagagctacttcactagataaatggtaatgtggctggggaaagggcagagatggaaaacactttgaagacataatctcctcctgtaccttttttatatacaaccaaattgaatgtgcaaataattgaaaatttttgttttgatcaggattcagtgagctgtaaagttcaagtcccttttgacaaatattgttgcatagataaatacatacaatattaaatttcagttacatccattaggttagcattcaacgaatacttcagtatcaggcaatctgctagtgcttgagatgcaaagatgaataagacctggccttagctctcagcactctcatagtctggtgtagggttcagcctaagtgcattttggaaatgccaggtatgctctcagattccttcctgaaaggaagagttcagagtcccagaggtatgtctgccctctcctttctctcctgctacagtggaatatggggctatctgtagtttctgcccacgtgagagtgccatcactgccctgttaccattgcccacactgaggggacggcgccaagggcgtcaatgtttgtcctaaaggccctttctcccatagcttcagctcacactggcatctctcatgcataattgtgcttggaatatgtacagaagaaatctttataataacttagaaccgagttcataggaattaggttggaggacagtcctttccactagctccttgttcctggatcagtccctgcctctactctcattcttgtggctccaacccagcattcttacaaataggcttccttagaaggaaacatatctgattccttagatgaacataactaagctagacttcctgctaaaataagtaaccagagaaatatgaaaattcaaattctgaccagtttggaagtgaatgaatgaagaaccagtctctgtgtttgtgtgtgtgtgtttgtaggaagtgtgtataccaattcctgctcccaattctattaatccaagtgtataatgagtatttaacaagaaatttctatgttccatcactgctcttaacaccctggtgaatataaatgctataaaaatggtaattggtctcagtctgtttttaaaatatactgttggagaaaacacctacctaagtcacggagcagtgaaaatgtatacatctcttccatctcaagccaattttgcagatatttagtgctgtgaagataagtatagtatatacttacgctatatgtgcttcttcaagatagaacatctttaaacttggatataacatacaagtaatatctgtttagaaaaaaggtacaatataactgtcaaggctttaaatcatattttaaagaaagcactttattttactcttttgataaaaattacaggttgctgaagaaatagagaaaatgtcatctagagagagtgctttacaaattaaaatattagatctggaaactgagcttagaaagaaaaatgaagagcaaaatcaacttgtttgcaaaatgaacagtgtaagtattagcatggcttaacatattataaaagataacatttaacattcttaccatgtagaaaatacaaagtgagtgaatcaagtctattgttttactgataatattaaaaataacaagcaatataagacataacaaataaaaatgttatgatatgccaaataatttattattctgcctctttggatggcatgtattgcattgccatcaaatctcatcaggcactttccctacatattacttttgcaatgacatctgcttaatgaaaattacagatataatctacttgatttcatcctgatatgaatttttcattttttaaagataaacacagtgtaaactattattacaagtgagttttatatctgtcttgaataatgaatattttgttttagaaagttataattttgtagtaaacattcagtattgttagatatacatgtgagatggatgctttagtccactcagccatgaaatgaaaataccaaagtgactgtgcttaattagtcttctgttttttttcctgaatactcatgaaacagtcaattggcatagaatattctgaaagctagcattactcatgattaaattacgtaataactgtctactagataatgacatagagaataatgatactgtgttttttccaggatccagaactccatgaaatctatttttttaattcccaagtgtctaaaaagttgaaaacctaaaagattcaagagttaaatgatttttggcatgcacaatttgattttattgccatcaaaagtttcatgacaacttagtcagaacaaacgtcgatcacctttaatttagcacaggccttccatttatttctaaacttttttttaactcaccatttgactttctgatattgtgaatgtgtgtgctgtttttttgtgtaattgaagcctctgaaaaaataaatgaggtgggttttgctgtaatgtccctagtacttggctaaagctagtaaaataaatagatcccattcacaattgccacaaagagaataaaatacctaggaatccaaattacaaggaatgtgaaggacctcttcaaggagaactacaaaccactgcttaaggaaataagagaggacacaaacaaatggaaaacattccatgcttatgaataagatgaaacaagatcatgaaaatggctatactccccaaagtaatttatagattcagtgctatccccatcaagctaccattgactttcttcacagaattagaaaaaactacttcaaatttcatatggaaccaaaaaagagctcacataaccaagacaatcctaagcaaaaagaacaaagctgtaggcatcacgctacctgacttcaaactatactacaaggctacagtaaccaaaatagcatggtactggtgccaaaacagatatatagaccaatggaacagaacagaggcctcagaaataactccacacatctacaaccatctgatgtttgacatacctgagaaaaacaagaaatggggaaaggattccctatttaataaatggtgttgggaaaactggctagccatatgctgaaaactgaaactggatcccttccttacaccttatacaaaaattaactcaagatggattaaagacttaagtgtaagacctaaaaccataaaaaccctagaggaaaacctaggcaataccattcaggacataggcatggacgaatacttcatgactaaaacaccaaaagtaatggcaataaaagccaagattgacaaatgggatctaattaaactaaagagcttctgcacagcaaaagaaactatcatcagagtgaacaggaaccgacagaatgggagaaaatttttgcaatctatccatctgacaaagggccaatatccagaatctacaaagaacttaaacaaatttacaagaaaaaaaaccccatcaaaaagtgtgcaaagaatatgaacagacacttctcaagagaagacatttagtcagccaaaaaacatatgaaaaaaagctcatcactggtcattcagagaaatgcaaatcaaaactacagtgagataccatgtcacaccaattagaatggtgatcattaaaaagacaggaaacaacagatgctggagaggatgtggagaaataggatgcttttacactgttggtgggagtgtaaattagttcaaccactgcggaagacagtgtggcgattcctcaaggatctagaaccagaaataccatttgacccagcaatcccattactgggtatatacccaaaggactataaatcatgctgctatagagacacatgcacacgtatatttattgtggcactattcacaatagcaaagacttggagccaacccaaatgcccatcaatgatagactgaataaagaaaatgtggcacatacaccatggaatactatgcagccataaaaaaggatgagttcatgtcctttgcagggacatggatgaagctggaaaccatcattctcagcaaactaacacaagaacagaaaaccaaacaccgcatgttctcactcataagtgggagttgaacaatgagaatacatggatacaggccagggaacatcacacaccagggcctgtcagggcgtggggggctaggggagggataacattagaaattcctaatgtagatgacgggttgatgagtgcagcaaaccaccatggcacgtgtatacctatgtaaccaacctgtacgttcgtgtacatg

SEQ ID NO: 2035 - DNA, 12566 bp, Homo sapiens
aggtagttaacctgtttttttcctaatagttaaacagttgtcttattgtcatttatttagttgtccatgtttcctccattgatttaaaaatctaacctttatcatgtattaagtataatttttgtgtatttttcttttccagtaacctctgtattctattgatttttcatatctaggcacatttccaagtttttttgtcagtaaatttagaaagttttaaaaataatatgtcctgtgtaaatcttaataaggatgttcataattattagtcactagctttgtgaaattcctaaattttagatggtattgcatgaaataaaaaataattattttatcaactttgttaatacatgagttatgtttttataataattctgtagcactggagtataaatgtattctaatgacttataaaatctatatcttttttgctagactacacttgctgctttgaaggatgaagttgtatctgttgaaaatgaactctcagaattgcaagaagtagaaaaaaaacagaaaacccttattgaaatgtataaaactcaggtgactactgcatttattttagtgtttactaaaattggtagacaatttaaaacactatttctttgtaatctaaataaatagaactgaagagaggtggggctatcattgtgggttataatatggtgtgtctcaaatatttcttaaggtcccacacatctttataaatagatgattctgctgattcctgattcaaacactgcatatggatatactggatattcctaaaagtagatttaaaatgaattacatcggtataatgtgacccttaatgtattcttgttaatcttggttatatttgtttgtcatcatgtgtatttaatggtattgatttagattaatgactcccttctagggtcattaaagttcattatgcctcctttctcaagaaataaagtataattcagattattcacatgaaagaccaagaaaagaacatatgacaatatatatgaaatagaccatgtgttcaatggtaatttatagaaaacctttatttttttggaaatgtagtattcaagaaaaaacttcataagatgggacttatgcaggtccttgcatgatggttaacacactggtcagagagagtttgaattaaagaataatgaactggctgggtgtagtggcgtacacctgtaatccactgggaggctgaggtgggcggatcatttgaagtcaggagttcgagactagcctggccaccatggtgaaaccctgtctctactaaaaatacaaaaattagccaggtgtggtgacatgcacctgtagtctcagctattcaggaggctgaggcaggagaattgcttgaatccaggaggtggaggttgcagtgagccgagactgcaccaatgtgctcccagcctgggcaacagagcaagactccatctcaaaaaaaaaaaaaaaaaaaaagaatgaactaaggatgaaagcttaagggggccaaagtgtgggcaagtaggaaggggctgcatctcgatggattagatgggaaaattaagttgagacatccagttagaatatttcagtcatccaggtctgaggtaggaatggaggttgtggtggactgtgggacttgttattcatcagggtcttccagctggttatttgggtttaatccctcagcaggaatactgtggttgagtgaccatattctgggtgcagggcctagaatttttttttttttttttagcagattttgatttggtgggaaaaataatttaaatggaagctagtttggaccagagactgattctttgaagtgacattgatctgcaaatgaaaatctttgtagtcttcaaagctcaagtggagagtttagaagtattgatgagagaagacaggtaaatcagacaaagattgtgggttagagtagagcactgagtgattccatatttaaagaagtaataacattagatgaaccagtcaaggatattgataggaaaataatgacttgtttaaaatgaaattttaaattttagatttttatctcatgttatgattctaaaaataatatgtttctctaatactttattttcaggtacaaaagttgcaagaagcagctgaaatagtaaaaagcagatgtgaaaatttgctacataaaaataaccaaataacaaaaaccaaaaataaaaatgtagagaaggtacgtttggaatttcaaataaataatattttatatattttttactttatgaatagtacacaaattcattcattttggtcattttctctagttcatacttaggaaagggctagtcttagcctctgtaagagtttgttttccaaggaaataatgtttcttccaggctggaaatgttgtttgtttatgtgaatgttttttcacttttttgttaatatttggaaaatagcataaatgtttaatttttctgatgcaagagcagactttaaatagctcaaaaaatggttatcaatcataagtatacaaacctaagtatctctcatttttaatctcaccctttttttctggttataaatgttttacgtctacaaaagcaaagccaatatctgctaaatgcatttttgaagaaaaataatatcttttaaaaaacgatcatttccttttatttgttctattgcaacagaatgaagggaaggccagtgttggcgagttatgatgtttttgtgaatattttaaaatttttaaatgaaaccgcatctctgtttggttttttgtgttgttttggtaaagaagcagtgaaagttgtaggatgctgactcctggcagcagaggtcatgcgatgttagtggtcgcttccatctgaatctaataaggttactctctctgggttgctccctatcttaggattgagaagtcagagcaaggcaataatgtgaagaagaggtcagccagagcaagcgtcctccagttatacagacataaagatagctcactgaatgcacaacttactgctttcatggaattacttttcacctatttttagcaggccagcgaataaaccatttcatgtcttttggtctcattttctcatgaaacataccagtgcaaatgtctccttttctgctaggcagcactgtaaataaaagcatattttacaatcctgttcaaatgacggaaagggttggagcctgtctttttcagatactgtgaggtcacaatgttttctaactagtatttaacaagacaactatttttttaatgaaatttttctttttcttacttcactgttttaagtctcctggttttctcatggcctctaagatgttttaaggacactgagggatcctttgttctggatccctcagtgtccttaaaacagacatttttcagtctgttttttttttttcctgttttactttatataccatcagaatatggatcatgtgtatcctgttagtagccacatagccttctcctagctcaatgcctagcacgtagtaagcactcaatatttttttaattaatgaaattttttttaaaggagcagtccaaggatggcgacaagtcttttttcttttactttcaagacagttttaggaagcattccctgtctgtcttccaaatataatctggattttaattttgcaaaaaaaaaaaaatactgcattatctttcctgatcaagaatgccagatactacacagaaactattaggtgttcctgtctcagggaaagagtctggctattttttgtaattagcagtgcaaacatttcttaaggttgctgcttttcacatctccacgaaagtgctgcagcgaggaactgcagtagccaaaacagattaatgtagatgaaattagagagatttgttgatagtaacattaatggccaaattaaaggcaagtgagaactgatgatactagcaatttttaaataatatacagtaaaccctatcagttttggctaagatgagtgaagcaagctgctctaatttaagtaagtatctgagttataagattgaatgactaaaagtgacaattcctttagaacctatagctgggcagtagacaattacggctttattagtaatggttattagtgataatctatgcttgaatataatgtcaggattttaaaaatttgctcttaaaaattagttaaacatccaccctgtcagctaatttaccctatttatgtgctcaacaaactttttgaaaactaaagtctaccccactttttagttatacattcttatttaacagagtttaatatttattcagttgtgttcttatttaaagccattatacctaaaatacttacgttataagcatatctagtatttaagataataaaaatattaatgctgaatgtgtgatcttgcacttatttccctactgccacaactcagatgagaggccagatggagtctcatctgaaggagttagagcgtgtctgcgattccttgacggcggcggaacggaggcttcacgagtgtcaggagagtctgcagtgctgcaaggggaagtgtgcagaccaggaacacaccattagggagcttcagggccaggtgtccagccgtccttctgagttttgctagatgcgttaaaagaatgctttggaatgatttcaccagttgagggcactcatgtcagggcttgatttttaaattcccatctacttagttcgtaaaacatcattttcatgcagatactataatacagttttgcaagctattcttttagtattttatggtgaaaaattggtaattaaaattcttattttagtttattcatgcaaatctatagacatttgaagacatggtaatagaatgagagaaggagcaaagttatacttacatatatgttccttgatgtaaggataaggtaaattattgaaacttacattacaaaaattgaatttattttaattagaattgtacgtcaagttttttgggatatttttcagtctgtttctttttcctgttttactttttataccatcagaatatggatcatgtgtatcctgttagtagccacatagccttctcctagctcaatgcctagcacatagtaagcactcaatatttttttaattaatgaaattttttttaaaggagcagtccaaagatggtgacaagtcttttttcttttactttcaaggcagttttaggaagcattccctgtctatcttccaaatatgatctggattttaattttgcaaaaaaaaatactgcattttctcacttaaaaagtaggagctaaatgatgagaacacgtggacacatggagaagaacaacacacagtggggcctttcagagggtggagagtgggaagagggagaggatcagaaaaaataactaacaggtactaggcttaatacttgattgatgaaataatctgtacaacaaacccccatgacacaagctgacctgtgtaacaaacctgcatttgtacccctgaacttaaaagttagataaaaatatgcagacaaaattttagtttaaattcctgagaagagatttttctagtaaaatgtcaaacgacatagattagcctaaattactaattgaaattatgagaaaaaaattttttccttgaatcaaagcttcttacattatttagagcagattttgaagcagtgggaagaatattctgtcttggcatgggtgagtgtgtctttggttgatttgttcactttgcttctcaaaaaaatatgtattttatttacagtttcgacttcacagatactcaattattaatcagtatttttaggtgaaacagaaaaccataagagaaaccctaggtatccaaaaataggagattaatactgcttaaaattttcctatttcaacttaacaaaataaatatctttcttcaataaggtgttgttcaaagtgttttaatagccatcatcctgaattttttttagttggttattttccaatacaggcaacataacttctttaaatttaaccaggaatttaaaacttccattttaacaatataacattttcttggtgtctttctgtgtaagagtagtaacatttataccttctcgttgcttgtggttgttctaacaataaattatatggatttctttggaagttgattgtgaagaaaatgactaagaaaacttttttttttcttttaggttgatggaaatcacaatcttctgacaaagctttctctggaagaggaaaactgtcttattcagctgaagtgtgaaaaccttcaacagtaagtattaaattacttaacattgctgctgcatatttctctgcacattaacattttaaaatatatgttttctgtaaaaagaaaattagaacagatggacgcagaaaataaagagcttgagaagaagctggcaaaccaagaagaatgtcttaagcacagcaatcttaagtttaaagagaaatctgcagagtatacagcattggccagacaactggaagctgctttagaagaaggaagacaaaaggtatgcatggcctttatttagaaactttttaattcatttaccaaagagtcatctttttaaacatcttgcaacctgtagttattgtttttgtcctgatgacagggtgaagggagcaattacatttttcttctttaactatcttccttttcaagcaaaacagatacattgctaggctagagctacttcactagataaatggtaatgtggctggggaaagggcagagatggaaaacactttgaagacataatctcctcctgtaccttttttatatacaaccaaattgaatgtgcaaataattgaaaatttttgttttgatcaggattcagtgagctgtaaagttcaagtcccttttgacaaatattgttgcatagataaatacatacaatattaaatttcagttacatccattaggttagcattcaacgaatacttcagtatcaggcaatctgctagtgcttgagatgcaaagatgaataagacctggccttagctctcagcactctcatagtctggtgtagggttcagcctaagtgcattttggaaatgccaggtatgctctcagattccttcctgaaaggaagagttcagagtcccagaggtatgtctgccctctcctttctctcctgctacagtggaatatggggctatctgtagtttctgcccacgtgagagtgccatcactgccctgttaccattgcccacactgaggggacggcgccaagggcgtcaatgtttgtcctaaaggccctttctcccatagcttcagctcacactggcatctctcatgcataattgtgcttggaatatgtacagaagaaatctttataataacttagaaccgagttcataggaattaggttggaggacagtcctttccactagctccttgttcctggatcagtccctgcctctactctcattcttgtggctccaacccagcattcttacaaataggcttccttagaaggaaacatatctgattccttagatgaacataactaagctagacttcctgctaaaataagtaaccagagaaatatgaaaattcaaattcagaccagtttggaagtgaatgaatgaagaaccagtctctgtgtttgtgtgtgtgtgtttgtaggaagtgtgtataccaattcctgctcccaattctattaatccaagtgtataatgagtatttaacaagaaatttctatgttccatcactgctcttaacaccctggtgaatataaatgctataaaaatggtaattggtctcagtctgtttttaaaatatactgttggagaaaacacctacctaagtcacggagcagtgaaaatgtatacatctcttccatctcaagccaattttgcagatatttagtgctgcgaagataagtatagtatatacttacgctatatatgcttcttcaagatagaacatctttaaacttggatataacatacaagtaatatctgtttagaaaaaaggtacaatataactgtcaaggctttaaatcatattttaaagaaagcactttattttactcttttgataaaaattacaggttgctgaagaaatagagaaaatgtcatctagagagagtgctttacaaattaaaatattagatctggaaactgagcttagaaagaaaaatgaagaacaaaatcaacttgtttgcaaaatgaacagtgtaagtattagcatggcttaacatattataaaagataacatttaacattcttaccatgtagaaaatacaaagtgagtgaatcaagtctattgttttactgataatattaaaaataacaagcaatataagacataacaaataaaaatgttatgatatgccaaataatttattattctgcctctttggatggcatgtattgcattgccatcaaatctcatcaggcactttccctacatattacttttgcaatgacatctgcttaatgaaaattacagatataatctacttgatttcatcctgatatgaatttttcattttttaaagataaacacagtgtaaactattattacaagtgagttttatatctgtcttgaataatgaatattttgttttagaaagttataattttgtagtaaacattcagtattgttagatatacatgtgagatggatgctttagtccactcagccatgaaatgaaaataccaaagtgactgtgcttaattagtcttctgttttttttcctgaatactcatgaaacagtcaattggcatagaatattctgaaagctagcattactcatgattaaattacgtaataactgtctactagataatgacatagagaataatgatactgtgttttttccaggatccagagactccatgaaatctatttttttaattcccaagtgtctaaaaagttgaaaacctaaaagattcaagagttaaatgatttttggcatgcacaatttgattttattgccatcaaaagtttcatgacaacttagtcagaacaaaacgtcgatcacctttaatttagcacaggccttccatttatttctaaacttttttttaactcaccatttgactttctgatattgtaaaatgtgtgtgctgtttttttgtgtaattgaagcctctgaaaaaataaatgaggtgggttttgctgtaatgtccctagtacttggctaaagctagtaaaataaatagatcccattcacaattgccacaaagagaataaaatacctaggaatccaaattacaaggaatgtgaaggacctcttcaaggagaactacaaaccactgcttaaggaaataagagaggacacaaacaaatggaaaacattccatgcttatgaataagatgaaacaagatcatgaaaatggctatactccccaaagtaatttatagattcagtgctatccccatcaagctaccattgactttcttcacagaattagaaaaaactacttcaaatttcatatggaaccaaaaaagagctcacataaccaagacaatcctaagcaaaaagaacaaagctgtaggcatcacgctacctgacttcaaactatactacaaggctacagtaaccaaaatagcatggtactggtgccaaaacagatatatagaccaatggaacagaacagaggcctcagaaataactccacacatctacaaccatctgctgtttgacatacctgagaaaaacaagaaatggggaaaggattccctatttaataaatggtgttgggaaaactggctagccatatgcagaaaactgaaactggatcccttccttacaccttatacaaaaattaactcaagatggattaaagacttaagtgtaagacctaaaaccataaaaaccctagaggaaaacctaggcaataccattcaggacataggcatggacgaatacttcatgactaaaacaccaaaagtaatggcaataaaagccaagattgacaaatgggatctaattaaactaaagagcttctgcacagcaaaagaaactatcatcagagtgaacaggaaccgacagaatgggagaaaatttttgcaatctatccatctgacaaagggccaatatccagaatctacaaagaacttaaacaaatttacaagaaaaaaaaccccatcaaaaagtgtgcaaagaatatgaacagacacttctcaagagaagacatttagtcagccaaaaaacatatgaaaaaaagctcatcactggtcattcagagaaatgcaaatcaaaactacagtgagataccatgtcacaccaattagaatggtgatcattaaaaagacaggaaacaacagatgctggagaggatgtggagaaataggatgcttttacactgttggtgggagtgtaaattagttcaaccactgcggaagacagtgtggcgattcctcaaggatctagaaccagaaataccatttgacccagcaatcccattactgggtatatacccaaaggactataaatcatgctgctatagagacacatgcacacgtatatttattgtggcactattcacaatagcaaagacttggagccaacccaaatgcccatcaatgatagactgaataaagaaaatgtggcacatacaccatggaatactatgcagccataaaaaaggatgagttcatgtcctttgcagggacatggatgaagctggaaaccatcattctcagcaaactaacacaagaacagaaaaccaaacaccgcatgttctcactcataagtgggagttgaacaatgagaatacatggatacagggcagggaacatcacacaccagggcctgtcagggcgtggggggctaggggagggataacattagaaattcctaatgtagatgacgggttgatgagtgcagcaaaccaccatggcacgtgtatacctatgtaaccaacctgtacgttctgtacatgtatcccagaacttaaagtataataaaaattaaaaaaaataaagatctgatgttttgttaaacctgataagttttgtactagtaaaattctagaattctaagcatagatttaaacattgctgaaaaatgagtttgtgtgttttatgccttccaggggacagttaagtgggcagtatttatttaatatacctgcttcagccccatttgaattgtaagcactctgaaagcatgtctcatagtcgtctgtatccctggtgtctcccacagtgccctgcttacctgcaggcctttttgtattttctgtccaagtaccctaatagggtggtgcagaatggatgtacagatctgtggatgacctcagcagcttaatccaaggcacccctcgggaagcctgaaatgtctttgaagtcttatgtattatcctaaaatccattgacattttatattctaccctacaaaataagtatgtgttactatttttctttccaaattgttgagtaaaactcattgtattcatcctgtgactttgtactgcccagcctagctcattgttttttacctgcctcatttcctgagctgggcattgctcagtttcagaaggtatcaggtgtcattgaacacctgatatgaaggatgtaaaagttctctcttttctatctaggtgtctatattttaattggaggctagatgatatttgcaacctgtctttatctaaagcattgtcagtgaactcacctacttaggaattcatatgcaccttagttaaaaaaaatgtattgtggttttaaattttttcctcaaccagtgtaatatgaagaattctttttattttttaagagattctaagaaaatgttcacattatcaaaactagaattctatcaacttttaagacatttaattattttggaataaaatgtgaatttttagacagaaaatggcaaaaactagtatgaaaatatatcatgttacatgtgaaattatgacagttgttaacctattaagttaatcatgttaaatatgtaataatttggggctaaatgaatgtatattataaattatatcagtgaagatcaaccatgtgtgtgctttaattattaattttaaagagtgagctctaagaatgaacacatcagatgtgagtattattttaaaaaatcaaaaagaattatctagttattgtatatatgtttttaatattatgactctggtcctttggaatgaatgctattattgcttatctgtatttttttccttttttctttagaaagcacaacatcaggaagtgtgtttgaaagaagtacaaaatagtcttgagaagtcggaaaatcaaaatgagagtattaagaattatttacagtttcttaaaacttcttatgtaacaatgtttgaataaattgtcaaatttattttctctaagtagtagatttttattatgagtctaaaatgtgattgggtaaaaaaataaatatactaccagttacattttatgatttatgagtggtagtattagaggtttttatgtaaagatttttgaaacataatttatctaactgaaactttaaaataggatagttgttactattcctgtttgctggataattcttatttatctttggtttaatttcttttaaaattaaattggttgttagaatatttttctcacacatagacatggaagtcagattcattctttgtgatgtttgtagccaccattcaagtgaatttgtagtaagtctt

SEQ ID NO: 2036 - DNA, 338 bp, Homo sapiens
cagaaaaccataagagaaaccctaggtatccaaaaataggagattaatactgcttaaaattttcctatttcaacttaacaaaataaatatctttcttcaataaggtgttgttcaaagtgttttaatagccatcatcctgaattttttttagttggttattttccaatacaggcaacataacttctttaaatttaaccaggaatttaaaacttccattttaacaatataacattttcttggtgtctttctgtgtaagagtagtaacatttataccttctcgttgcttgtggttgttctaacaataaattatatggatttctttggaagttgattgtgaa

SEQ ID NO: 2037 - DNA, 297 bp, Homo sapiens
caatatgattttaaataatatatataattgttttatattatgatatataaatgtaaaatattctgaattttaatttttaataatggtgtaattacatactttctaaagctactaaatgtctcaatatactacacttaatattgtttcaagtatatgctgagttgccattataatttctgttaggttttaagtatacaattttaaatcatcgctattaagtaccaactgctaatgacagatgaaaacgtggtcatgcattatttctttataaagaatagatattcaggctgtcttcaa

SEQ ID NO: 2038 - DNA, 788 bp, Homo sapiens
tccatcatctctcatcgttactgtgacctcctgatcattctccttgcttcagccctggcccctgcaggcagcattcagtattagcagtagagttgtttctataaaaatgtagtcagctgggtgtggtgtctcacgctgtaatcccagcactttgggaggccaaggtgggaggatcacttgagctcagtttgaagaccagcctggtcaacatggtgaaaccctgtctctactaaaaatacaaaaattaactgggcatggtggcgggcacctgtaatcccagttactggggaggctgaggcaggagaatcgcttgaacccaggaggcagaggctgcagtgaacccagatcacactactgctctccaacctgggcaacagagtgagactgcctcaaaaagaaaagaaaagaaaattccaaagagccctcatagtgattccaggtgctgagttctgacgtgtccttcactgaaggtcattgactgcctgggcacggtggctcatgcctgtcatcctgcaacttcaggaaggcaatgtgggaggatcgcctcagctcagaagtttgagctcactctgggcaacatactgagacctcgtgtctacaaacaatttttgaaaattagccaggtgtggtggtgtgcgcctctcagctacttgggaggctgaggtgggaggatcgcttgggccggagaggctgaggctgcagtgaaccatgattacactattgccctccagcttgggcctgacaccctgtttcaaaaataaattaataaatacaaattaaaaagtaaa

SEQ ID NO: 2039 - DNA, 1147 bp, Homo sapiens
ggtggcagtaggcagcagcctgcattcttatatttgggacagcgctcagaagactcttcacaggtgctcctcctgcctggtgtttgatgtggacagccacgtctgctccatcacagcaactgtggactcacaggttgctatagctactgagcttccattggataagatctgtggcttaaatgcatctgaaacctttaatatcccacctaacagtaaagacatgactccgtatgctttaccagttattggtgaagtacgctctatggataaagaggcaactgattctgaaacaaattctgaagtatcagtttcttcttcctatttagaacctctggatctaactcacatacatttcaatcaacataagtctgagggtaattctcttatttgtctaagaaaaaaggactacttgacaggaactggccaagattcttcacatttggtccttgtgacctttaagaaggcagttaccatgacgagaaaagtcactattccaggcattctggttcctgatctgatagcatttaatcttaaagcccacgtagtggcagtggcttccaacacttgtaatataattttgatctactctgtcattccatcttcagtcccaaacatccagcaaattcgattagagaacactgaaagaccaaaagggatatgtttcttgacagaccaactattactaattttggtaggaaaacaaaaactcactgatacaacatttcttccttcttcaaagtctgatcagtatgccattagcttgattgttagagaaataatgttggaagaagaaccttcaataacatcaggtgaaagccagactacctactctactttcagtgctccgttaaataaagcaaatagaaaaaagttaattgaaagtctttccccagatttttgtcaccaaaacaaagggctgttgctgacagttaataccagtagtcagaatggaaggcctggaagaacacttattaaagaaatccagagtcctctgtctagtatctgtgatggctccatagctctagatgctgagcctgttacccagccagcatcgctgcccagacacagcagcacaccagaccacaccagcacactggagcctcctcgtttgcctcaaagaaagaacttacaaagtgaaaaggaaact

SEQ ID NO: 2040 - DNA, 4071 bp, Homo sapiens
gctctgcctgaatgagttttcatctgattgtggggaccaagtccctgagtagagggccaagagctagggacagggggaagagactggcccaggtggtagggaggaaagaactcccagagtttcctttagccaggaaacctgctctactgaccccgtgacttggacagtcagacatcaccctgagagtgacaagtgtaaaatgactcccttcctcccccgccctccggaagtatatttagatacttgaaagcagtccttttctaaaatggccttacctatgtggcctgaacgattaaaagaaagaactcagagttacaagggaaaaagaaaaagagttacaagggaattgtagtctttttctgaatagaatattagtactgtggtattgcatttcatgggaatggaaatgtattggtaaagctacctgatggaagctttctcttggtaacaaaaatggagggtgtattatgtgcagttatttaaatatatgtattccattgttgcgtggtttttttcccccctcaagacagagatttgctcttgttgcccagggtggagtacaatggtgtgaccttggctcactgcaacctctgcctcctgggttcaggtgattctcctgcctcagccttccgagtagctgggattacaggtgtgcgccaccacacccggctaatttttgctttttttttttttgagacagaatctcgctctgttgctcaggctggagtggagtgcagtggcacaatctcagctcactgcagcctctgcctcccgggttcaagagattctcctgactcaacctcctgagtagctgggattacaggtgcctgccactatgcctagctaatttttgtatttttagtagagacggggttttgccatgttggccagggtggtctcgaactcctgacctcaagtgatccacccgcatcggccccccaaagtgctgggattataggcgtgaaccaccgcgcctgtcccattgttgtgtaattttaataattagttttttaagtacttgattttatgggcacatttttgtgggatgattggagttaatcaaataaagcttgtcatgtgtgtagtttggtaagataacttctttaaattcatgttttctctgccttgaggtagtgagggaaagatcttaatcagtattttggtaattaactgattgaattcaagcaaatgagacatcatgaacttcagtggttattgatatttcagggtatatacctgaaatgcctagaggatacagatttctcatttcattctttggtctttcatttctctatatacagaaatgaaatgacacttctgggaggcagtagaagcaggaagtcaatgaattgagtagagggtcccattccctcaggctgtcattgatcagtgacaatttataaaaacaaactgcaaagtctgtggcaagtggctgcctgcttcctagaaggagcccatgaaggttaaactctgtggtcggtatttgcaagcgccgggcgtggtggctcacgcctgtaatcctagcaccttgggaggccaaggcaggcggatcacccgaggtcaggagtttgaggatttgcaagcaaaaggtcctctcctgagtctttcccagatacccagcagtgcagaggctagctgtggaaggttgcagtgggacaggaatgtattgtatgccttgccttacttgtcaccattgagatttccagagaaatgggcataacgtctcttaacaacaacagcagaaagcaaaatacattaacttaaggttgacaacaaaagattatcaagtaccatgttttccaaccaaccagttattcgtggtaataataaaataaaggtgggaaaatgttataatttttaaggaaactgtgtactttaaaaatcttctttatgaatatccaatgttactgtaatcctgctccattaaatgcagcattgttgtcaggtgctgcctcttgcttgggaacagcattgggcttttaaatgtctgcagaatctctgcgttcgaagggaattgagaatgaacttcctggtactgtaatgaaaataaggtctgctcaacacagtaaacgtttcctctcttctttaaaactgcgcagtcatttggcctttgtgtttaggaagggcagattgatagagcacaaagtccaaccccttcatctagcagaagctgcaaacccagacagaggaacgagggctttacctgagtcttgtctgctgctggggctggcttcgggttgcatccagttctttggattctgaggatccaaagcacccaggtctcctccaggtcctcaacctctgggagctgccccaggcagaacttggcaggcaggcataacaggtggggtgggagggggaacctcaaggcaagaaggtgtcatgagacccctgggccggcagagttccttaggagggtggcatggactttgcattttgccagttctctgagctcctactccggggtggatatgcattgaggatgtagtctctgtgtgatgatggggagggcggggaggggcacctggtgcctgtgaaggcgcaagagagggccctaaggtgcaggaccaggactaagctgctacaaggaggtggtgcttaggttgaagcctgaggactaagtaggggcgaggggtgggcagaggggaggagcttgagctagtgtttttgagggagctgcatggaagcctgcacgtggccaggagagggggaatgggtttgatcctgggggcacaagaaggcccttcaggggtttaaactgggtgctggcactaaatgggttttttcttgtaataaactttgtgttgaggtctgtagcacatactgaaaagtacataaacacacaccttgatagtttttcacaaagtgaaagcactagcatatccatcatccagataaagaaaaggaagttggagtttattttaacacttaaacatctgattacagtctggcatccaggaagggcagagcagcatgtgtcagaccagcctacgcctgatcattacacacactatttgaaaagcactagagcctgctgagataccggcaagagagggagagcacgaaccatcagaagaagtgaaacctcatgtggctcacagggaataaaacagaaggtggcaggcttactaggcccaggagccaagtcacttcaggacgttcttggccgctgcacacttgtgtgggggcacatcccagaaaggaggaagccatagaagcccccaactttgccttgtatagtctcatcaagttcttggcgggttcctgtattatacataaacagggcagaattccaaatggaaagcaacacttggaaggctggaaaagctgagtagagatttcagaagatgtgctggggagaagaagtttagaattcattttccatcaaattagagggatttggtaactatttcagactttgcatcgaaaacccagggtgtaggccttaggattaggaccacatcacagaactcaaatctagggtctaggactgagggcaacactaagatagacctaccctcgtaaagcctaaaatgaaggcttagcagaatcagggtgatcgctagtaaccaaactctgctaaaacaaaagtttttgtgggaaaaaactgaatccagagtgtctatagtatattattcagaatgtcctgtatataaccacatcagtaggcacgacaggaagtgggaacatatgacgtgatcaagaaaaaaaatcaggctgggtgcggtggtgcacacctgtaaccccaggactttgggaagccgaggcggttggattgttggagcccaggagtttgagaccagcctcggcaacatggtgaaaccccatctctacaaaaaatacaaaaaattagccaggcatggtggtatgtgcctgtagtcccagctactcagaaggctgcggtgggaagatcatttgagcctgggaggttgaggctgtggtgagctgtgatagtgccattgcactccagcctgggtgacagagtgagaccctgtctcaaaaaaacaaaatcaaaacaacccataaaccaaggtgttgaaatcattcaataaaaatgttaaaataattata

SEQ ID NO: 2041 - DNA, 87 bp, Homo sapiens
agcctcctgagtagctgggattacaggcgcctgccaccatgcctggttaatttttgtatttttagtagagatggggttttaccatgt

SEQ ID NO: 2042 - DNA, 328 bp, Homo sapiens
ggtaggagttaatggaattttaggagtcacacataaaagtcttcatgtgtaagaactgcactttgactccatccattcacttattcaacagatatataccaacagcctaatgtgtgacagggatcatgctgcaccttggaaataaaatagtgagcaaaacacagtcctgccctccagcactcatagttttgggggcagagacccttacaaccacgatacaacctgatgatctctttccaaagtcacagagccaaattcctttttatttttttatttttgttttttaccttatctgtggacagagagccaatttccaaagaaagaagtg

SEQ ID NO: 2043 - DNA, 328 bp, Homo sapiens; identical to SEQ ID NO: 2042

SEQ ID NO: 2044 - DNA, 328 bp, Homo sapiens; identical to SEQ ID NO: 2042

SEQ ID NO: 2045 - DNA, 699 bp, Homo sapiens
atcatctttttgagttttataaatctccaaacttcaaaactagtagatgctggtataaaacctaataatttcagttcaatctttacattctccagggtccacttttcattctcttaagtacaagcctatttctcagtttggcatagtgccaagaacattgataaatgttggccccaaaatgattgtcaaagttctgttcacttaaattcactgtaattagtaagaatagttatcatttattttgggtgccttcaaagtagactatgctaggcaacaatttctcttgataatctcacaatagccttggcatttgaagaaactttggcctagaaacatttatgcccccaagatcacacaactagaaagaagcagaagttgatttatctcctaaatctatgtgacttcaaagctggtcatcctaccactatgcctggttgcctatatcatttaatgtgatgaaggcactaatgtgacacccacaccgggctcaatttattagtaatccttctatatcacagccacacaagtgcttagagttcctggctgagatcagtctatataattatattacacttctcaagtttagtagtgctagacaaataggaagggagttttacattctttgtttatttgcaataatttcatgattgtcgtaattaaactatagcccgagtttaaagaagaagccagccaaaaaaa

SEQ ID NO: 2046 - DNA, 699 bp, Homo sapiens
atcatctttttgagttttataaatctccaaacttcaaaactagtagatgctggtataaaacctaataatttcagttcaatctttacattctccagggtccacttttcattctcttaagtacaagcctatttctcagtttggcatagtgccaagaacattgataaatgttggccccaaaatgattgtcaaagttctgttcacttaaattcactgtaattagtaagaatagttatcatttattttgggtgccttcaaagtagactgtgctaggcaacaatttctcttgataatctcacaatagccttggcatttgaagaaactttggcctagaaacatttatgcccccaagatcacacaactagaaagaagcagaagttgatttatctcctaaatctatgtgacttcaaagctggtcatcctaccactatgcctggttgcctatatcatttaatgtgatgaaggcactaatgtgacacccacaccgggctcaatttattagtaatccttctatatcacagccacacaagtgcttagagttcctggctgagatcagtctatataattatattacacttctcaagtttagtagtgctagacaaataggaagggagttttacattctttgtttatttgcaataatttcatgattgtcgtaattaaactatagcccgagtttaaagaagaagccagccaaaaaaa

SEQ ID NO: 2047 - DNA, 440 bp, Homo sapiens
tgatttagatggggtctgcctgtgttggcccaggctagccacgaactcctgggcacaggcaatcctcttgcctcagcctcctaaagtgctgggattacaggtgtgagccaccatgcctgggcagtctcataataattttcattcctgactttttttcagatctagtctctagaaagaaacttgtgcataccaagacagtatggccaaaaacctatcctggcaagtgttaatgctatgtttccactcctgaacaccaggaactgaacattgttgtgtttgggtattgtgagtatggaagtcattcaattatttttcaaagcgggcttagtacatgatgttttgttaagctaccttgagaactggagtttgtgtttaagtttcagtgagataagggtagacctcctaatgcctgtgaaaattttgatatattttataatgta

SEQ ID NO: 2048 - DNA, 361 bp, Homo sapiens
aaaatacatgttaagtgaaataagccagtcacgaaaggacaaatattgtattttttccacttaggtatctagaatggatacatttatatagacagaaagaatattaagggccgtggggagcatagggaatggagaattattgcttaatggctacaaagtttctatttcaggtgatgaaaaagttttagatattgtgatggttcaaaaggaaaaagtaacaatttttattgttgaacatttaggagacaaagtcaaaattcaccaagaggaaaagaataaattacccagagataaccaatgtttgaatttttatattatatatttttgttgcttcttttattttatatttttaacaaattga

SEQ ID NO: 2049 - DNA, 440 bp, Homo sapiens; identical to SEQ ID NO: 2047

SEQ ID NO: 2050 - DNA, 301 bp, Homo sapiens
  SITE (7): n equals a,t,g, or c
  SITE (63): n equals a,t,g, or c
  SITE (107): n equals a,t,g, or c
cactctnatcagagtttctcagttgtttatctcttttataaataacctttgatttttaatctnttctatttggtgtttattacataatttatactttttttgctctntgttacccctctccttctttcatgttgctgtcttttttcttacttcttgaaatagaagcatggctcaaattttcacctaatgcatgcattcttcaatgttataaatttttccctatgtcttagctttagtatacgttttgatatacatagtactattatttagttcaaattattttcctttttttttttctgag

SEQ ID NO: 2051 - DNA, 314 bp, Homo sapiens
tttcgttatcactcttatcagagtttctcagttgttttactctttataaataacctttgatttttaatcttttctattttgtgtttattacataattttattactttctgctctttgttacccctctcctttctttcatgttgctgttcttttttcttacttcttgaaatagaagcatggctcaaattttcacctaatgcatgcattcttcaatgttataaatttttccctatgtcttagctttagtatacgttttgatatacatagtactattatttagttcaaattattttcctttttttttttctgagaca

SEQ ID NO: 2052 - DNA, 314 bp, Homo sapiens
ttttgttatcactcttatcagagtttctcagttgttttactctttataaataacctttgatttttaatcttttctattttgtgtttattacataattttattactttctgctctttgttacccctctcctttctttcatgttgctgttcttttttcttacttcttgaaatagaagcatggctcaaattttcacctaatgcatgcattcttcaatgttataaatttttccctatgtcttagctttagtatacgttttgatatacatagtactattatttagttcaaattattttcctttttttttttctgagaca

SEQ ID NO: 2053 - DNA, 3022 bp, Homo sapiens
taatttttattaattaattaaaattattaaaacatgagaactttaaaccagccattgtaaatattcttagtgatttaaaggaacacatgaagatgataaggagagaagtggaagatgcaaaaaaggaaccaatggaaacctgtggatgaaaaatattagagaattttaaaactcacaaaatgggattaacagcagatcatacactgcacaagaaaagatcagagaacttgaagagagcgaaagaaaccatccaaaaatgaaacatagtgagaaaaaaagaccaaagaaaaattatgcacagagagcctcagagactttagggacaatatcaagcagtataaaatacatacaactgtagtcccaggagggcagggatgggagtgtgggagtgttttaagaaataatgggccagacaccgtggctgacgcctgtaatcctagcactttgggaggccaaggcaagtggatcacttgaggtcaggagttcgagaccagcctggccaacatggtgaaaccccatctctgctaaaaatacaaaaattagccaggagtggtggcacatgcctgtaatctcagctacttgggaggctgaggcaggaggcagaggttgcagtgagccaagatcatgccgctgcactccagcctggatgacagagtgagactccagctccaaaaaaaaaaagaactaacggccaaattttttccaaacttgatgaaaacgctttgtgtagttatctactactgcataacaaattgctccaaaatttagtgacttaaaacagcgaacatttattttctcacagtttttgaggattaggaatctagacatgtctgaatcagaatgcctctgactcagggtttctcataaagttgcaatcaacgcattgactaaagctgcattatctcagagcttgaccaggaaaggatctgctcccaggctcactctgtaggtgttggcaggcctcgggtcttaactggcattggcaggagacatcagttccttgccttgttggtctctttatgggtctaaaatgtggtagcttgcttccctcagagtgaggagagaggagtgagggcgaaagggaaggaagttgaaagagagaaagtaaaacaaaagtcaagatctttgtttaagctaatcttgaaagtgacatcatatcacgttaaccatattctatcaattaaaagtgagtccctgggtagagcccacataggtgagacttcataaggacctcataaggtagggatcattgaggtttgtttcagagcttacgtgccacgccattacatcacaccatacacaaaaataacctgaaatgaatcatagacctaagcataaaaaaggaaaacaataaaatatctaaaagaaaatcttatgataagcaaaaatttcttccaagacacaataataaagtacaaaaaatttgataaagtggactatattaaattaaaaacttctggccaggggcagtggctcatgcctgtaatcccaacacttttagaggtcaaggtgggcagatcagcttgaggctaggagttcaaaaccactctggctaacaagatgaaacccccgtctctactaaaaatacaaaaaattagccaggtatagtggcccacacttgtaatcccagctactcaggaagctgaagagcgagaattgcttgagcctgggaggtggtgagccaagattgtgctactgcactccagcctgtgccacagagcaagactctgtctcaaatataaataaataataaaaaataaaaataaataaaatttttaaaatgtctgcttttcaaaagccaccattaagaaaatgaaaaaagactgtgagaaaaaaattgcaattagtatatctgacaaagtacttgatttttttttaatcttacaactcagtaataatagacaattttactgcaaagttaaatgtatactcatcatgcagacatgcagttttactcacagatgttacccaagagaaatgaaaacacatccacacatagaccaacctgggcaacagagtgagacctcgtctctacaaaataaaaaataataaaattaaccaggcatggcagtgcatgcctaaagtcccagatacttgggaagctgaggtaggaggatcacctgagcctgggagtttgcagctgtgaaccctgatcatgccactgcactccagcctgggcaacagaccaagactctttccaaaaataaaaccaaaatatatcgacacaaaaaacctgtacacaaatgtttgtagatatttataatggctgaaaatgagaacccaaatgtacatcaccaggtgcatggataaacactcagaaataaaaaggaacaaaccactgatacactcaacaacatggatgaatctcaaaaaggagattgaaaaaaaaaacagatatagaagactatatactgtatgatcccatatgtgtgaaattctagagaaggcaattctaatttataatgataaaacagtttggatgcctaggactgggatttgaggggtggggcagtgactacaaaagggaagagggaactttttagggcaatggacctattctgtatcttttttttttttttttttttttgagatggagtctcactctgtcacccaggctggagtgcagtggcacgatcttggttcactgcaacctctgcctcatgggttcaagcgattcttctgccacagcctcccaagtagctgggatacaggcatgtgccaccacgcccagctaaattttgtatttttagtagagacggggtttcaccatattggcgaggctggtctcaaactcctgacctcaagtgatccacctgcctcggcctcccaaagtgctgggattacagacatgagccaccgcatgtggcttattctgtatcttaattgcagcggtggttacatgagtgtatgcttttgtcagagctcaccaaactctacactcaaaatggctgcaccttatttcccacaattatatcccaatgaggttgattttaaaaccaaaataaatattgcctttgcatga

SEQ ID NO: 2054 - DNA, 395 bp, Homo sapiens
taatttttattaattaattaaaattattaaaacatgagaactttaaaccagccattgtaaatattcttagtgatttaaaggaacacatgaagatgataaggagagaagtggaagatgcaaaaaaggaaccaatggaaacctgtggatgaaaaatattagagaattttaaaactcacaaaatgggattaacagcagatcatacactgcacaagaaaagatcagagaacttgaagagagcgaaagaaaccatccaaaaatgaaacatagtgagaaaaaaagaccaaagaaaaattatgcacagagagcctcagagactttagggacaatatcaagcagtataaaatacatacaactgtagtcccaggagggcagggatgggagtgtgggagtgtttt

SEQ ID NO: 2055 - DNA, 438 bp, Homo sapiens
gtgacaagaaagttcttgagtaaaggctaggaggaaaactatctgaggttacttatttgcctaatccttctatattagaattaggagatgtaaattagtctccagatcacttgtgttgccttcttagtcccaccgtagccatgacagacaaattctcagccctcgccctgctgactgtgtgcaaagttagagaacagcccccaaatccaccccccacttttggaactgcagagtttgggggggtccgcaagatcaccctcgggttcaatagtttactagaacgactcacagaactcactaaagctattatacttacagtgaagggagacagactaaaatcacccaagagaagagatatatgggcaaagtccaggagggtttcagatgctgagcttccagttttcctttcccagtggagtcatggatagtgtaactcct

SEQ ID NO: 2056 - DNA, 1572 bp, Homo sapiens
gtgacaagaaagttcttgagtaaaggctaggaggaaaactatctgaggttacttatttgcctaatccttctatattagaattaggagatgtaaattagtctccagatcacttgtgttgccttcttagtcccaccgtagccatgacagacaaattctcagccctcgccctgctgactgtgtgcaaagttagagaacagcccccaaatccaccccccacttttggaactgcagagtttgggggggtccgcaagatcaccctcgggttcaatagtttactagaacgactcacagaactcactaaagctattatacttacagtgaagggagatagactaaaatcacccaagagaagagatatatgggcaaagtccaggagggtttcagatgctgagcttccagttttcctttcccagtggagtcatggatagtgtaactcctcctgtcagtggtgtgtggtaatacacatggagtattgccaaccaaggaggctacgtaagccttgatgtcgtgaatttttactggggctccatcacatagatataattggccaagtggctgacctcagtctccagcccttcctgaggttgagttgatagtatgtaacctaaagtccctaccataaatcatattggtagacttatctgtcatggcttaagtcccctagtaaatcattatcaagaggatattcaaagagtttaacattacttcctaagagctaagggcaaatgccagacctctctttgggcaaggttaaattctttactacataccgtgctagttgaagtgttaggcctaactaagaggaaggggaaggggactagtttggagttttttgaactaagaaaatgtattttctgcttaaaaagttaaatatatatatatacacattgaattttttttaaaaagtagatccaagttgatagagcttccaggcacctgagagatgcaaactcagatcatccctggtggaatatacctcaaccctggcttcaaagaattcttaaagatagattaccaacatatgtgagcttataatagtaaccaaaaaaccaaaaaaaaaatcacaaaagaaacacggttctgtgaaccagcatcaacagaaacaactgaaccagacccagagaaactttaggtattggaattattgaatatagaacataaaataaatatatttaatgaaatagaaaagtaaataaagaccaagaataagaaatgagagaataaagcaagactggttggtttgtaaaataagcaattaaattattttagaaataaaaaaataatgattgaaagaaactcagtggaggggaacttacagttctggtgatagctgcgtaacaggaagctgatttatgctgctgtcttaagtgaataattggacaaagtatatgaaaaaatgttttcagatattggacaaagagtagcatagaacagtgattcctgagagaaaagaaagaagtttgagcactatgattgtccacctttcagcctgaagaaagtttctgggttgaaactagggttgggagggatacacatacagagctggcaatcttgaattgaggagacagaggt

SEQ ID NO: 2057 - DNA, 153 bp, Homo sapiens
gttttacacccttaataaaattgagttcgcatcagtttacaatgaaagtcttttaggtgactttcagaaccagaatcacatatcatctgcagagctgttaacctcattttccaaattcctatgacacttttcacaagagttatgtttgcccca

SEQ ID NO: 2058 - DNA, 174 bp, Homo sapiens
aaaaaattacctgggcgtggtggcgggcgcccgtagtcccagctactcaggaggctgaggcagcagaatggcgtgaacctgggaggcagagcttgcagtgagccaagatcgcgccactgcactccagcctgggcaacagagcgagactctgtctcaaaaaaaacaaaacaacaa

SEQ ID NO: 2059 - DNA, 132 bp, Homo sapiens
agaggaaggggaaggggactagtttggagttttttgaactaagaaaatgtattttctgcttaaaaagttaaatatatatatatacacattgaattttttttaaaaagtagatccaagttgatagagcttcca

SEQ ID NO: 2060 - DNA, 153 bp, Homo sapiens; identical to SEQ ID NO: 2057

SEQ ID NO: 2061 - DNA, 839 bp, Homo sapiens
acttacaccacatcattaccattgctcaaaaaagaagttacaagaaaaatcaggaaatattttattttgaataataattaaaacaccacatatcacaatttgtgggatttaactaaagtagtcttcagcgggaaacttttgttttaaagaagtagatgagaatataggaaagataaaatcagtgatctctgcttttacattcagatgctagaaaaaggcaagttattaaacctaaagtaagtacaagaaaggaaataaataaaagcagaactcagtgaagtggaaaagaaacaatggagcgcccaaagctagaagataaatttttggtaaacattaataatattaacaacccttagtaattaaacctatagagaaaaaaagagggacatcactgtatattttatagacattaaaaggataataaagggtatatttatgccaataactttaacattttagatcaaatggacaaattctttgaaagatatgtcaccaaaatggacacaagaacagatagtaagtctaaatatccctatagctgataaatcaaatgcataattaaataatttttaagggcaggcccagtggctcatgccagtaatctcagcactttgggaggccaaggtgggcagatcacttgagctcaagagttcaagaccagcctaggcaacatggtgaaacccatgtctacaaaaaatacaaaatattagctgggtgtggtggtgcatgcctgtagtcccagttacttaggagggtgagatgggaagattgcttgagcccaggaagctgtggtgaaccgagatcgcgccactgtacttgagcctgggtggcagagtgtg

SEQ ID NO: 2062 - DNA, 531 bp, Homo sapiens
agggtcctttgagattccatatgaattttaggatggatttttttatttctgaaaaaaagaagtcatttggattttgataggggattttattgaatgtacagaatcaataaaatccatattgatcaatacagattcaatatctgtatcaatctggggtagtgtggtcatcttaacaatattaagtcttccaatccatgaatgtggatatctttgtgttttctttgatttctttcagcagtgttttgtggttttcagtgtacgagtcttttgccttcttgattaattcctaagtattttttattctttgtgatgctattgtaaatggaattgttatcttaattttctttttatattgtttattcttagtatatagaaatggaactattttgtgttgactttgtatgctgctactttcctgaattcacttactctggcagggtttttcgttgtggaatatttagtgttttcttcgtaaaagatcttagcttctgaaaacagataagttttcttcttcccaatttgggtatcttt

SEQ ID NO: 2063 - DNA, 108 bp, Homo sapiens
attttttttttttttttttttttttgagacggagtttcactcttgttgcccaggctggagtgcaatagcccaatctcggctcaccgcaacctcggcctccctggttca

SEQ ID NO: 2064 - DNA, 16511 bp, Homo sapiens
  SITE (14362): n equals a,t,g, or c
atagaagagaatgaggacagagacacaggactggaacagagacataataaagaagacccagactgcatcaaagccaaggtgcccttaggggacctggatctatatgatggcacatacataactttggagagcaaagacatcaggtaaagaagttctctttccaaaaataaaattgctgtttcaaacatttcctttctcaaattagtaagaaattatttctgtaataagggtaagcttcaatcacagatgagttttcgaatttgaaaattcaaaatacatactacatgtagaattcttataaattaatttaaaatatttaacaccacagtagaaaatggaacaacttggctgggcgtggtgcctcacacctataatcccagtactttgtgaggccaaggcgggaagattgccaacagccaggagtttgagacaaggctgggcaatatagcgagaccccatctctacaaaaaaaaatgttaaaaattagccaggcatggtggtgtgcacttgtagttgtagctactcaggaggctaaactgagaggatcacttgagcccaagaattcaaggttacagtgagctatgatggtgccactctaccctagcccagactccaggctgggtgacagagtgagaccctgtctcttaaaaaaaaggccgggtgcggtggctcacacctgtaatcccagcactttgggaggcctaggcgggcagatcacgaggtcagaagatcaaaaccatcctggctaacacggtgaaaccccgtctctactaaaaatgcaaaacaaattagccaggcatggtggtgggcacctgtagtcccagctactcgggaagctgaggcaggagaatggcgtgaacccaggaggcagagcttgcagtgagccaagatggcaccactgcactccagcctgggcgacagagcaagactccgtctcaaaaaaaataaaaaataaaaaataaataaaaataaaaaaataaaaatgaaaaataaaaaagagaaaaaaataaaattgaacaatttgtagttaaaaaaattaacaaaaactacctatggccaataaacatggaaaaaaatttctcagaaattatcaaaaaagtacaaatgaaaacatttagatagttttcatctaccaaaatggaaagcatatcaaaaaaatagtaactggtcacaatgtagagagactgtcagtggaagtctcaattggtttaccgtttctagacaattgagcagttgtattagttattaaaaagtccatgatcttattctgtgacctatctactattttccctgtgattcttgactttaattcaaactcccaaaatgtttgactcttcatggcagctatgtgaaaaggtatgaatattgactaacaattgtgtaaagttgagatgctatgagaatatggggaaaatttgacatttcttaaagtattattgactgagcacagtggtttacgcctgtaatcccagcactttgggaggccaagatgggaggatcacttgaggccaggagttcagaactaccctgggcaacatagtgagacctgtctcaacaaaaagtaaaaaaaattaactgattgtggtggtgcatgcctgttgtcccagctacttggaaggctgaggtgagaggatcgcttgagactaggagatcaaggctgcagtgagctgtgatcatgccactgcactccagcctgggcaacagaatgagaccctttctctaaataaataaataaaatattgtttatctcaccttttattcattcattgcttctttttgattttagtcctgaagattatatagacacagaatctcctgtccctccagacccagagcaacctgattgtactaaaattctagaacttccatatagtatacatgcttttcagcacttgagagtaagtagagaactttaggatttttttttttttgcgttgcgttcttctttcagttggtctctcacttataaagaccatttctctttcttctctccttcctgacagctttgtaattttatagacatctcttatttcttaaaattccaaaatattagtatttcaaaataaacactacaagatactgaattatttgtcatcttttatatcctttgatatgtcttttgaatctttttcttctcttcagggtgtacaggagagagttaatctttctgcacctctgctacctaaagaagacccaatcttcacatatttatctaaacggttaggaaggagtatagatgacataggtcacctcattcatgaaggcctacagaaggtaagtcatcagtcacttaaagagccagcgggctgagccagcgggctctgtgtaaacagaagatatttttatcttggaaaatacctgactaatttgtttttatctagaagacgatttaaaattacacttacattgatgcaaattgcatagttcagtgctggggagaaatatggatagactagtctcctttcccaggaagagatgctggaaagttttatctaaactgatgaaaaacgaaatataaactgacataagcaacagcgtttataggctggattatatacattgtgtaagtaagaaagttaatgttttagtgtcgttaatatatctatacacaatacatgtattattactgttttctgagacagaaaaagaatcaccaccagcaacaaaatcttctgtaactttcttttaagagactatctactttaaaaaaaatgaaatagggaattatgtaacaggacccaggaatgtaaatgtatcattcaggattaacgtgggcatttagaaaatgtttttgctattctttgtgcctaaagagtatcataaaatgcagtttagtttctaagcagtattatagtggtataaaataagatgtataattgccacctttgtatacagttttttcaaatacatagctttgtatattgagaggaattttcagataaaagtccgataataacttgactttcagatgctttatatggttatttctgtagctgtgttaccatcttcatcttatttttctgaaggtaatgtaaaacttttacattcccagaacttgatgagtaataagagaaaactggcccaggattttacagtgtccttcagagaatggttagttgagagtagaccatagtggtaagtgttctatagaaaattaaaacagaaagtaactgggtggctactttagatctagcagttggggttatcctatccggaaacgtgaaatttaagctgacacctgaatcataagaagaaaccaaaattcaaagaccacggaagagcattctaagccacagcaaaggctctgaatcctgattgaggttaggtggttgtatttgtctgctcaggcttccataacaaagtaccactttggaccgtttctgctcaaaacacttctgacaccaaatgtatggagttttttctcacacgactaattcggtagttctcccgacatcaactaggtgttctacaactcaatacaattctgacactaactacctggagttagcacagaccccacaggtcaaggactcagtcccacaaggctacctgcacttcagatgccagtcgcaagtcaaggccaccagacaaattagctataaagtcagggtgttcccacagctgcctccccaagttagaacagctcacggaagtcaggaaagcactttacctactattattggtttattgtaaaggatgcaattcaggaacagccaaaggcataagccagggaatagggggaaggggtgcacagagcttccatgtcctctccagaacaccaccctcctagaatctcaatgtgttcaccaacccagaagctctcaaaactctgttgtttaagggtttctacggaggtttcactatgtaagcattattgactaaagtattggccatgagtgatgaactcaatctctactctctctcccctccccgaaggacagggggaggatgggattctgaaagatctaaccctctgatcatgccttggcttttctgggaccagcatctgtcctgaagctatctgggggccacctgcctccagtcatcccattagcatatgaaagacacacattactcctgtgattcttcaagttttaggtttgtgtgtcaggaactagggacaaagaccaaatatatttgttcttaccacatactaggtggcttaaatttatttctcatagtctggaggctgggaagtctaagatcaaggtcccagtgatttggttcctggtgagggctctcttcctgccttgcatatggctgccttctctccgtgtcctcacatggcctcatctgtgtgcatgcttgaagacagagagagatctgtctcttccatttcttataaggacacttataggaagaaatcaaatttgggccccaatccttatgacttcatttagcctttatccactcctcacaggcctgataacacttgaacatatgaactttgaggagacatagactttcagtccgtaacaggtggcatgcagccaaattcaggccaatattgctggagcctggtgagcaagaggaaggatgataaggaatgaagccagagaagtaggccagtgccagattatgtaagggtctgaaatccagggtaaggattttggattttactccaagtgtgctgagaagttggagcagagaagcaatgtattgcaattaatagttgaaaagatcactttgattactatatgaagaagttattgaaggggccacaactggaaatagacctgttagaaaactgttgcagtagttcaagagagagatgaaggtggtttggactagcaattgttagtagtggaaatgagaggacttgaactattcaggagatatttaggagtttagaagcagatgagttagatatggggattgaaggcaaaagaggaatcaaggaaaacttaaatttttgacttgaacaactagaaggaagagagggttggggtgggagaagagaaaataagagttctatttgggccatgttaaattcgaaatacctatatgagtttggaatttcagggaaagttagagttgggcacatagagattaattattaaataatgaatatctgaagccatggaactggatgaagtcatctggggaagagtgaagtttgagaagaagccagtctgactcctgggtgcctcccacatgtagttatcaagcagagggggaaagccagcaaaaaagaccagaaagggtatcctgcagaatgtggtgtcctaagagtcaatggcagaaagtggtcaaagaaaggagggagtagttcacagtaacattagaacatttatagatttgggggagattttatgagaactacacaaagatatttctttaaatatatatttttatcttacctccagtatgctatgatatatatttaacttatcatgatctcttcagtagttcatgtagaactttttttttttttttttttgagatggagtctcactctgtcgcccaggctggagtgcagtggcgcaatctcagctcactgcaagctccgtctcctgggttcacgctattctcctgcctcagcctcccgagtagctgggactacaggcgcccgccaccacgcccggcaaattttttgtctttttagtggtgatggggtttcaccatgttagccaggatggtctcgatctcctgacctcgtgatccacccgcctaggcctcccaaagtgctgggattacaggcatgagccaccgcgcccggcctcatgtagaacttttaattgaactttttgtccccgtttacattataatgtgaaaataaaagatgaaaatcaaaatgaaagcatttgttgatttgaaaaacaactttctcaaaaggccatcaaaaagaaaactgaaacctcggccacaagtcagttgtgaagaatgtactgtcctttaaccagcttcaagtagaagttcatagttgatctgctcatagtgttaaaatctgtaattgcatcactcaaaaatcacatacttttcttgaagatagaatacttaaggatgaataatgcaggattgtacttattgtagtcttaaaaagctacgtttaactaaattcaaactatttttaactacattaaaataactcttttaaaaataattggtccttgtgaaagagtcactgaaaatctataaaagaaagtaaaattaataatttcaaaactggtttgtaatatattcttttggagtttgatttttacacagctttatagttaaaacgtaattattccccataggatacatttttaatagtagaattgtgggagtcaaagggtaaatgtaatatacattaatatgtatgataatgtaatatacattacatttttaaagctttttacatacatgtcaaattgtcccccagaaatgctatagtaacttagcatttctatagtttaatatctaaagttaataatattcagtaagtattggctttctttttagtctttgccactttgtaaaaggaaaacttgtatcttttaagtttctatttctttgtgaagttacacattttacatacttcttagctgtttgttcatgtttttggccctttttcctttttttttttctgtctttatgtttagagtaagcctgttggtttgtgccttcactcagatattacataaatagaaaaaattctaaaatgttaatttcaggaatttcatgttagagctatttctaagtagatgaggtcttctgacttaacttctgaagtcctgaaatagagctcaacaagttgtgatcagttggtgggatttttcttatttccctcttggaataagctggagttggatggtctctatatgaagatcacaccctaatgcacgtgctcagctgatgattagaatgctcttctgacaggtatagtttctttgcactgtgtcctgttctttatcattgcttatcattcagtctggctcttcttcatcttgaatttcagaagagccagaatattaaaggtgctccttttgagtattctaagttaaactgtcttgagtcgtgtttgtaattttacttttttaatctctagaacacttcctcgtgggtactgtataacatggcttcattttactggagaattaagaatgagccatatcaggtagtagaatgtgccatgcgagcacttcacttctcttccaggtaagattcctcctcttctggacctgattttccacattcctcaggactgttaaagaaacaatacataagaaagcagtaagaagcaacattgcattatatacttttctccatccctgttcaaagaaataagtcccaccacaaaaaaaaaaaaaaaatcacagatctcaaaaagttcaaagtgataattgtgtaatatactttccatttccattaaggaaaaaatatgtagatgccctatgattcacatgatacttgaatggaattatcataaactaagtttaacttttcttaaagcaaatataagccctaaataaattgtaaaatcatacagtgtctgcaataccttattttagtgacaaaatttgtagctatcagattaagagccatcaataatttaaaaatgaaacactatgattatcttattttctccacctatatcttagtttcctaagcacaagtaactttgaatgtcatttttccttgtcaagtggttctacataatcatggaatatgtgctgctttccttaggcacaataaagacattgccctggtcaacctggcaaacgttctacacagagcacacttctctgctgatgctgctgtcgtggtccatgcagctctggatgacagtgacttcttcaccagctattacactttggggaatatatatgcagtaagtactactctttgtttcatgagtcatgctagttgccactttcttttttttttttttttctcccccctcagtagaatgttacttttttccattccttttttggtctgaacgatggaaatgaaattaggaggaagaaaaatcctcaacacagtaatgtaattattctagcctcttgccaaaaaaacaataataataattaaattggaattttaaacttctacagggtacaccttttaaggttagcaatacctgccaactaaaccatcctatagtatgccttaatattgtagggatctggtcactgatcaaaataatggtcactgtagagtaagaggtaggtgtgatctcataaatcattagaggatttggacagatgcaaccaggccgtggctaacatttttttttccgtgtgtgtgtgtgtgtgtgtgtgtgtgtgtgtgtgtgtgtgtgtgtgtgtatgtttgtttttgtctcttcagatgcttggggaatataaccactcagtgctctgttatgaccacgctttgcaggccagacctgggtttgagcaagctataaagaggaagcatgctgtcctatgtcagcaaaaactggagcagaaattggaggctcagcataggtaattgagaggaaaaatttcactcaagcattagcactatcgaaccttaggttaaatctgtgtaggggatatcagtgttaatttggtaactggaattaagaaagaaacctcttcactactgcaagtcctatcctttttctgtaagtcctggtggtttagcacaattcagtggttgtgtagaggaatatctttaattgtatggattcctgcaactagagaatatttgtagtaaaagctgtcacttaaatgtttacaattttgaccattgattacttttatgaagtcagttggggtggggagactgggatacttagttgactacttactttgttgactgcatttttatttgcatagaatatactaagtttcagtaaaatcacttacatgtgcaatagttgatatttctcctcttggagagaggtggtggctcctagggttgagttattgttaaggtagttaaatggcattgagagacattatttggcccacgttttaatcatgattgtgtgttaggttgtacagtaatggaattctattgtatttgatccttgaggtataataagttaaaaaacatttccttcaatcagtagggctagttaagaaacttcatgttaactcagaagtgaatttttcatatctcagaattagctgtaatatttgagtttactttggttagtagagaattaaacagagatttagaactcattaaacttttgtatttgcttcttttccaatctttttaaggcataatgtggtaggaagtaaaaaggatgccagcttgcttattcataactggtttctgttatacctggctgagctttttccagtatcatgctcttaataattgagctggctctatctttacacaatctgtatagttcctaaaatctctgtatgttacagtgtgtaataggcagtatgggttttctgattaaatgtaatcaggcagctgatttactgaaatcaggtggtgaagcatattcctttcgaagcatagtttctgtagtttttcctggcctgtaaccaataagctagagtatgaaagcaaagtactgtggcccctaactcttaactttgtctttaagcagaatctagggaaaaagtgaaaaggaggaaaggattctagaaagactttgaatgttgatggaactaatgcaaattttgtagagagaaatagagttgttaaatacataaacttgtatatcgtcatgtatttttttatggcacctgaaaaatgcaatataccatttgatgtcatgatagttgtattgccaggtgtcatggctgatgcctgtaatcccagttattctggagactgaggcagggtggaggggaggaatcacttgatgccaggagttcaaatctagcctgggcaacacagcaagacccagtttctaaaactaaattagccaggcatggtggcgtgtgcctgtagtcccagatactccccaggagactgaggcaagaggaccccttgagcccaggagttgagcccaagagtacaaggctgcagtgagctacaatcaggcctctccatccagccttgacaacagagcaagaccccattttttaaaaaagttgtatttaaaggaagaatttcacatttatctttttgccctagtattcttgaactggtgatacagggttgtatgttaaataaaaggaaaacacacagtaattgttgctgagaaccagaaaaatctgtgcatttaagtgggtttaaaatttatgattttatagctctaactttttcctggtattaaaaaatgttaagatctctccagcgaacactgaatgagttaaaagagtatcaaaagcagcatgaccactacctgagacagcaggaaatcctagaaaaacataaactgattcaggaggagcaaatcttaagaaatatcattcatgagactcagatggcaaaagaggcacaattaggtaagtagtgactccaagtaattgaagacaggttaggaaattcacttttagcatgctttactatcataactttcttgtagccttaaagcagtgtgaagttgtgtttatgacttccctacatctcgaaagcatgattcatcactgtgggtataccaggaggcctggggagctggtttggtctaccttgcttttttcaaatttacattttgaaataaaaaacaagtcttgtagatcctagaagtcttaacagttatttgcattctgtgttcaacatcagttttttttcctaccctaatatgcatatcagtctcctggagatcttgttgaaatgcagattatgattcagtaggtctgaattgaggcctgagagtctgccttcctaataagctcccaggtgatgcttgttgccgcaggtctaaaaactctgcactatgggtaacaaggccttacactaagtgaatacaagccagacccaccctacaaacaacccatccatactcctttttttcttgctctcttaaaaacagtgttttagaagtaaaattttagactggaattcttaacctgggtcaatggattagtttcagggggttctgaaatcctctccaaaattatatgtagaattgtgtatgtgtccaattttatttttctgggaagagggtatctagcttttattaaaatctctcaagcatctgtgatccataaaaatagaaccactggtttataggaacttgggttggcatgagaacaatgatttggttatatctagaatgttttgtttctaatgacaagggagcagatctgacaactcaataacagagaataaattaatagaatctcttaattatacccttctcccttgataagtatgttggtcaagaaagcctcttaacctttggcacttagctgtgaccatttatagtttattttacaattcccttaacaagttttctttgctattatgagtgtaaagagtatgctcagtctttggaattacttactgcccagtatattgaaatgtaaccagagctcttatatatgcatttgaaacaaaattatgaagtatgtaaagcaaattctctccagaaagatggccaaagtctcttaaaacgatgtaatcactagattttacaatcacagactataattgctgaaagatacctcagtaatcatctagtggagtccctttgtttttgtaggtggaaaaactgggacttcttagaatgatttatttgattaaccattaatgaatatttctctatataagtacgtcctacgtaagtagcctgctaggctctgagggatacagggttgatactaaatgacttagtctaagaaaatcacattggcattgttgaccttgctcatcatttgtgtaatttcctttcttattccaggaaatcatcagatatgccgactggtcaaccagcagcatagtttacattgccagtgggaccagcctgtacgctatcatcgtggagatatctttgaaaatgtggactatgttcaggtctttttcttggtccagtctaattcttataaacgtttgctttataaagattttttaaaacttttgtttttcctcttgattctttgtatatttgatccctaaaatttgtgattgtcatttagatctttaagattttgaggctgggcacagtggctcacgcctgtaatctcagcacttagggaggcagaggcagaaggatcacgagcccaggagttcaagaccagcctgggtaacatggtgaaaccccatctctacaaaaacatatataaattggccaggtatggtggcatgcacctgtagtcccagctactcgggaggctgaggcgggagaatcatctgagctctggaggtcaaagctgtagtgaacccagatcatgccattgcactccagcctgggcaacagagcaagactgtgtctcaaaaaataaataaataaataaataaataaataaataaataaataaataaataaagagcgagagagagattttgattatctgttatgttgttatgtttacgaagtcagattttatagggagtactcaataactccatggatgctttctatttcttaaagtaccatctaaatatttatatgcacatgcatttgattcttttctcttttaccatgggagctagaattgggctattattattattgaactcaaagctttcatctccccactttcccttttagagtaagacctatttaaaatttgagagcaaccatgctatttgtttcctgaagtaatcagtccaattatattgcctcaaccaataccaccaacaaaatgctcattatcaacagaaaatctttattaagcccactgctaggtgtgtactttctctcactttctgtcgctgtatatacacacgtgtatacacacacacatacacatatacaatcctaatctatctagttgggaagaactaacacatgtaatgataccagatagtatataatagatgttgaataagtggtacagacagcaagtacagccagaattctgagtataaaaaaaaaagattcaaactctgaaactttttgagcactgacatgatgctcaaaagaaatgatcattggagcattttggatttcacattttttgattgggatgcttaacaggtaagtgtaataaaatattgcaaaatccaaaaaaatctcaaatctgaaatactcctgattaagcatttcagaaaactgatactcaacctgtattagaaataaaacatttattctatcttagagaaaactcatcatgtctaatcgtagatacagaaatttccagcaataactacttaagataactaagagattaggagagcatctataggaggacaaaccacaaaaacttagaactctttaatctggaaaaatccagactgcattgggaaaaaataagagacaaaaattaagaagccattttaaaggggaaatagtgatagggaccaaaagcttcctatgagtattgtaaaccagctcccagcaatatctcatgtttggtttccaagggaaaaaataaagaagaccagattcacaccctctgggattatagctctttatcttaaaaccaagcattttaaagggaagaagggggatgtttagaaatgaaatagattgaaacccaatacaccttttggactttttgatggtctcaagaccgatcatttgaaggagtgtagcttccaatagtctatattcataaaattgtatcaccactatatagtgaaagaatccattcctgttcacaaagacctagagctacaaattcgtcatattcattccttttccttttgtctttcctaccccatcccatccccagtcccattctcattatctagcaaggtttcagaaatacacaagcatctttgtaagtatatccaacattgttccaccttgctttgaaggaaggctgtatatgtttgtgttctctcatctaggttaccctttcaccctcaaaacttttctttgtaattgattgcacaacagtctgtaatccttaagtgatagttatagaacccttaagaatactttcttaagttccctcgcctctacccacacacggcacaccaattttagagtggtgagcattttagtgtaggaagaaaaggggaataatgaaccagatttctcaattagctaattattaacctaaagagactaaatcataaaaatgaagcaaagggacaggaaaacgacctatgccatttttctcatactccaatggcaaagttattgaaagttgttaactatgtattatccatgaaagaatatcgttggggcatagttcttaaaagatccaattgctttattactgagctactttctgattttctactaattttgaatattcactcgcttttttggtgtgagttaaattataatcacaactccttttccactttcaatttgattgaactttttgtttcattttctagtttggtgagatcatcaaacctccagtatgatgtctgtgaactntgatgttcaatcaaatcagagtgatatcaatgattcggtcaagtcttctcccgtagcccattctattctctggatttggggcagggactctgatgcatatagggtaagttaatagaggatgacgaagcagttttctcaaactggcaagatccattaaagcagtggccctcaacctcactgattaatatggcctctatgactgttcagattagttcagcaaacgtgtagtacatttctattaaatggaagctattctgctaggtagtgaatgagtaagatgcaatttctgccttgagtttttcccagtcaagtagagcagatagacaccctgatttcagttcaaagctttatcctctgagtattattaccaaccttaacaagtttctaaacttgacccaagcgtatgtttttatatacttcacttaatcggcattcttttattgaactcccacctgtgtgccaggctaatgctggcagtataatagataagcccccttgctcttctggagcctacattctggtagatgatacagacaataaacaagttagtacatgtgcctgtctagactagctaagaaagaattgtaggttagctgaggcggataccaaggtatgaggacagagactgtgtgctttttattcaccattaaattttcagaatttaatcaagggtttaacagaattaaacagccacttagatttaattatatttaatataaatccctcaaagtttgatagcttgaagatttaagtttagtaagcctctggtacatcttatttatttttagagaaaattaacattttacaaatcataaaacaattgttaaactttggcattggcaaagaaaagaccttagttcagggaaaagtagtgttcaatgccaggttttataggcttatgtatgctttcaggtacaagtcataagctccacctcaaattaaatacaaagaaaatgtgcctgttactacaggaagtccagaaataggataaacttcaggtttggttgattcagtggcccagtgatgtcatcagtgacccatttcttctttttctttttttttttttttttcttcactctgccatccacagtattggtttcatccaaaagcttggtttttttcatggtcatgacagccagcagcaactggaacaacatgattttttgttcatatgtaacgtaagagcctaagacttgcttctctttccgaaaagccccaagcaagcctcttcttgtgtctcactggctcaactggcttatacccgcccaaccctgaaccagtctgtggtaaagcaggtagaattactgacttagattaataatctgcagtagcaggaatattatagagtctaccataatcttaagatattatagttttgttcaattattgtagtatatcattttaaaagtttatttagcatattgaaatattgaatccaaagaaatttatgagaaattttgtttctttatcaggacaaacagcatattctatggcctaaaagagcagattgtacagaaagctaccctagagtccctgttggtggggaattgccaacgtattttctgcctccggaaaacaaaggactcaggcaagtggtgatggatttggcaaagcacctgattctgcatgattgtcatctagcggttctttgagagcaccagccttggacttgaaaagttaagtctttatcttgaagtcacccaaactttgaaaatatgaatcttgttcctttttcttgtgccaggatccacgaactcagcagtgatgattattctacagaagaagaggcccaaacccctgactgttccataactgacttcagaaaaagccacactctgtcctacttagtcaaagaattagaggttcgcatggatctgaaagccaaaatgccagatgaccatgcacgaaaagtaaggctcacttaggctggtatttattgccgtccattctgggtgacttcagaagcctcttaaatggaacaaaaaattgatagaaggtagctgttgagctttaagtgtataaaatggaaggatagagttaaagaattggtgaaatgatggcgaagtcagtcatgctattaaaggagtgccagagagttcctcggggctgctatacgtagatcacctaaacactattcctctaacgcaga

SEQ ID NO: 2065 - DNA, 224 bp, Homo sapiens
caagacactgtctcaaaaaaaaaaaaagggtggaggggggagataaaatattggcatatgatagatacgggtggtgaaaatgtggatatttgtgttattgtctgtacatttgaaaaaatagatattttatggttgacaggaattaactggaatacccaggtaccaatagcaacatgtactatgtcttgaaggattgaaacaacctgacaggtttgttttcactg

SEQ ID NO: 2066 - DNA, 2233 bp, Homo sapiens
aacctacgccgacttgaagccctggggttggtcagcgccagaaatggctaccaggggctagtggacgagctggccaaggtaacaacctgggcctgggctccgtgtgcctgtgtgtacgtgtgtgtgtgtgcgtgcatatacatgttaatccatagtgttggtgggcccctcctgatgagtcctcacccaaaattgtcaccagccagaggaaggctgagggtcctttttgaaggaaagatatttttttcttttttttttttttttttgagacagtctcactctcatccaggctggagagcagtggtgtgatcctggctcactgcaaccttcacctcctgggttcaagtgattctcctgcctcagcctcccaagtagctgggattacaggtgcgcgctgccatgcccggctaatttttgtatttttagtagagacacggtttcaggccatgttggcctggctggtttcgaactcctgacctcagggtccgcccatcttggcctcccaaaatgctgggattacaggtgtgagccactgcacccagccaaatttttgtatttttagtagagacagggtttcaccatgttggccaggctggtctcaaactcctgacctcaagtaatctgcccaccttaggctctcacaaagtgctgggattacaggtgtgaatcaccactcctagcctgaaggaaagatcttgaaattagttagagaggaaggtgttcttgcaactctctttttttttttcttccccacattagctgggtaatgtgcccaggtcagaaggtttgagagaagcatatctcacacaagagcatgaaaacccaatcctcagcttatgacctacaaaagtatccttgcaactttcttttactaaaaaacaaacagccttgaaaccagttagtcctcaacgggcagaggccctgaggacatgccttgaggatttggaataccatccttgagattttccttctaggaaaacagccttgaagcctgttcttccgaagagcctcacagtgtgtagctcttgggcctgtgtcaggccctaaggctctcctgccaggaaggaccactcatccctccatctgttccccaaccccaggacatccgcaaccagcacagacacaggcacaggcggaaggcagagctggtgaagctgcaggccacattacagggcctgagcactaagaccaccttctatgaggagcagggtgactactacagccagtacatccgggcctgcctggaccacctggcccccgactccaagtaggtgctgctttcccgtacttggaaggttacgagtgacttctcacccctgcccatgtcacctttgccctgctatctcccagctttgaaaggggaatctcacccagcacagcacagtcccttcctaagtctggtctttgagcctcatttacaaagtcttgggctcaagtgcagcccccctcctctgtcttccatcagtgagaagtcttcctcggggtctcatttcctttccagccacagaaaacaagtttctttggtggtaaagtgtttattggatgaattctctggggccttcttttaatcaggagttctgggaaggggaagaagcagccttctcttcattacactgctgctcagctcctggaaaagggtgtcttggtggaaattgaagatcttcccgcctctcagtatgtgtctttggagggcaggatgtcagccccttcctgtcctctaacctgggggtggagctctgggctggggcaccgggtggaagagaagaagcatggtcccgatcttgaaggagctgctagaatgatggtggagacagagcatgcccagacagaaagtgaagggctgtggacatggtctagcacagttctagatgccctgaggcagagggtactgggaaagctttccagaggtgagaacagctgcgtagggcggggcagataaagagatggtgtggggagcagaagtaaaatggagaagacagcgagctgggccctctgggagtgacagagggaaaactggttttggatgacaccgctgcccaggatgaggagcagtgggtgcaagaatgtggctgtagccctggaaagaggcagtgggttcctgttttgaatcctgttcctgacagcttcagaaacgtcatctttgacatcacgccgggagatgaggcaggaaagtttgaagtaaatgccaagttcctgggtgtggacatggagcgatttcagcttcactatcagg

SEQ ID NO: 2067 - DNA, 2240 bp, Homo sapiens
aacctgcgccgacttgaagccctggggttggtcagcgccagaaatggctaccaggggctagtggacgagctggccaaggtaacaacctgggcctgggctccgtgtgcctgtgtgtacgtgtgtgtgtgtgcgtgcatatacatgttaatccatagtgttggtgggcccctcctgatgagtcctcacccaaaattgtcaccagccagaggaaggctgagggtcctttttgaaggaaagatttttttttcttttttttttttttttttttttttttgagacagtctcactctcatccaggctggagagcagtggtgtgatcctggctcactgcaaccttcacctcctgggttcaagtgattctcctgcctcagcctcccaagtagctgggattacaggtgcgcgctgccatgcccggctaatttttgtatttttagtagagacacggtttcaggccatgttggcctggctggtttcgaactcctgacctcagggtccgcccatcttggcctcccaaaatgctgggattacaggtgtgagccactgcacccagccaaatttttgtatttttagtagagacagggtttcaccatgttggccaggctggtctcaaactcctgacctcaagtaatctgcccaccttaggctctcacaaagtgctgggattacaggtgtgaatcaccactcctagcctgaaggaaagatcttgaaattagttagagaggaaggtgttcttgcaactctctttttttttttcttccccacattagctgggtaatgtgcccaggtcagaaggtttgagagaagcatatctcacacaagagcatgaaaacccaatcctcagcttatgacctacaaaagtatccttgcaactttcttttactaaaaaacaaagagccttgaaaccagttagtcctcaacgggcagaggccctgaggacatgccttgaggatttggaataccatccttgagattttccttctaggaaaacagccttgaagcctgttcttccgaagagcctcacagtgtgtagctcttgggcctgtgtcaggccctaaggctctcctgccaggaaggaccactcatccctccatctgttccccaaccccaggacatccgcaaccagcacagacacaggcacaggcggaaggcagagctggtgaagctgcaggccacattacagggcctgagcactaagaccaccttctatgaggagcagggtgactactacagccagtacatccgggcctgcctggaccacctggcccccgactccaagtaggtgctgctttcccgtacttggaaggttacgtgtgacttctcacccctgcccatgtcacctttgccctgctatctcccagctttgaaaggggaatctcacccagcacagcacagtcccttcctaagtctggtctttgagcctcatttacaaagtcttgggctcaagtgcagcccccctcctctgtcttccatcagtgagaagtcttcctcggggtctcatttcctttccagccacagaaaacaagtttctttggtggtaaagtgtttattggatgaattctctggggccttcttttaatcaggagttctgggaaggggaagaagcagccttctcttcattacactgctgctcagctcctggaaaagggtgtcttggtggaaattgaagatcttcccgcctctcagtatgtgtctttggagggcaggatgtcagccccttcctgtcctctaacctgggggtggagctctgggctgggcaccgggtggaagagaagaagcatggtcccgatcttgaaggagctgctagaatgatggtggagacagagcatgcccagacagaaagtgaagggctgtggacatggtctagcacagttctagatgccctgaggcagagggtactgggaaagctttccagaggtgagaacagctgcgtagggcggggcagataaagagatggtgtggggagcagaagtaaaatggagaagacagcgagctgggccctctgggagtgacagagggaaaactggttctggatgacaccgctgcccaggatgaggagcagtgggtgcaagaatgtggctgtagccctggaaagaggcagtgggttcctgttttgaatcctgttcctgacagcttcagaaacgtcatctttgacatcacgccgggagatgaggcaggaaagtttgaagtaaatgccaagttcctgggtgtggacatggagcgatttcagcttcactatcagg

SEQ ID NO: 2068 - DNA, 107 bp, Homo sapiens
tcacttgaacctgggaggcagaggttgcagtgagccgagatcatgccattgcactccagcctgggtgacaggagtgaaactccatctcaaaaaaaaaaaaaaaaaaa

SEQ ID NO: 2069 - DNA, 95 bp, Homo sapiens
cttgaacctgggaggcagaggttgcagtgagccgagatcatgccattgcactccagcctgggtgacaggagtgaaactctatctcaaaaaaaaaa

SEQ ID NO: 2070 - DNA, 625 bp, Homo sapiens
cttcggttttttctccatccttccagattaacccagaagtgctgtgtgaagaaaattatttttgctcacctgtcaattctggaaataagctttcagactctttactgaccaatgagcctgtgaaaagagatagtttggcatctcactattcaggagtttcacaaaacatcagaagcaaagcacagatattagctcttctgaagtccgaatcatctagttcatgtgaggaactaaattctgagatgacagagcattttcctcaaaaacaaccacaaggaagtttaaaaattgctactaaaccaaagtacctaattcaacaggaagagtgtgctgagatgaagagcacagaaaatttatactaccagcatcaatcagaaaataccatgagaaataaaagccggtgggccatgtatttatcctcacagagttcacctatacattcttctactgtagatgggaatgatacagaaaggaaacccaaggcccaggaagatgatgtaaattctaatttgaaagacctttcattacaaaaaattatacagttcgttgaaacgtatgctgaagagaggaaaaagtataatgtagaccagtcagtcggtaataatgatccatcctggaatcagga

SEQ ID NO: 2071 - DNA, 436 bp, Homo sapiens
aaaacagtaatctattttcagaagatgctcaacctcagccttttattttgggaagtgacttagacaaaaatgatgaacatgttttaccctcaacttctagtagtgacaacagtgtccaactattaaataccaatcagaatcactatgaatgtatgcacttgataaatcaaatacccacatttccaattctttgttttacccactgggaaaaaagcatcttatttccaaagacacagaagcacatatatctgaacctgaagatttgggaaagattagaagtccaccccctgaccatgttgaggttgaaactgccagagaaggcaaacaatactggaatcctagaaattcttcagaactttctggattagtaaataccatttctattttaaagtcgctatgtgaacacagtactgctttagacagcttggaaatattg

SEQ ID NO: 2072 - DNA, 9669 bp, Homo sapiens
  SITE (3914): n equals a,t,g, or c
  SITE (4212): n equals a,t,g, or c
gctgcgcttcgcggcagaggcgtctgcggtgacagctcagtcagttgagctctgtgtgccaggcgctcgcgagggggtagctcttctagtagtgctcggcgtcagacatggcggaggcgatggatttgggcaaagaccccaacgggcccacccattcctcgactctgttcgtgagggacgacggcagctccatgtccttctacgtgcggcccagcccggccaagcgtcggctgtcgacgctcatcctgcacggcggcggcaccgtgtgccgagtgcaggagcccggggccgtgctgctggcccagcccggggaggcgctggccgaggcctcgggtgatttcatctccacgcagtacatcctggactgcgtggagcgcaacgagaggctggagctggaggcctatcggctgggccccgcctcggcggcggacaccggctcggaagcaaagcccggggccctggccgagggcgccgcggagccggagccgcagcggcacgccgggcggatcgccttcacggatgcggacgacgtagccatccttacctacgtgaaggaaaatgcccgctcgcccagctccgtcaccggtaacgccttgtggaaagcgatggagaagagctcgctcacgcagcactcgtggcagtccctgaaggaccgctacctcaagcacctgcggggccaggagcataagtacctgctgggggacgcgccggtgagcccctcctcccagaagctcaagcggaaggcggaggaggacccggaggccgcggatagcgggggtgaggaggctgagcgcggggcctcgcggatatctgcgcgggtggggttgggatctttctcctggctgcctggcgtccatcttggcatcttcggtagcagcgcttggccccgccccctgttgacatccgggtaaatttgcaccattttcttgccttctcgctcccttgttgtttattattgttctttttttgcgatgggtctctgttacctaagctggtctgaactcctgagctcaagcgatcctcctgcctcggccacccaaagtgttgggattacaggagtgagccaccacgtctggcctctcgtcgtttttattttttaatttttgagtgggggctcgctccgtcgcccaggctgtgatgcagccgcgcgatcacgacctactgcatcctggacctcctgggctcaagcgaatctccggcttcagcctcccaagtagctggaactacactcccgcgccaccacgtcccgctaaattaaaaaaaaaattgttgtagagatgggggtctcgttgtgttgccctgacaggtctcgaactcttgggctcaagcgatcctcccgtctcggtgtcccaaagtgttgggattacaggcgtgagccatcacacccagcttcttggtctagttttaatttactttaccattgactagaatattgacatggttctatattcaaaagttacaaaaagtatatagaaaattctctcttggccgggcgcggcggctcaagcttgtaatcccagcactttgggaggccgaggcgggcggatcacctgaggtaaggagatcgagacgagcctgaccaacatggcgaaatgccgcccctactaaaaatacaaaaattagccggccgtggcggagagttcctgtagtcccagctactcaggaggctgaggcaggagaattgcttgaacccggggggcggaggttgcagtgagccgagactgcgccactgctctccagcgtgggtgacagagcaagactccatctcaaaaaaaaaaaaaaattatctcgtccttcctgtccaccagctacccacgggctaactggcttcttgtgtttcttttaagagatattccacagactcctttttaaaaaagattgctgttatgttcaggtagattcagtataaaggcgtaccagacttactttaatgctctggcgtaactgaatgcctatggacttaagaaggttctcggcagttggaaggtctcttcctggtcttgcttaggtgaagtgagtttttaatgcagttgaattgaaaattggggttcagtatgtctaggatacagaacgagtctgttaagatgtacttggtgacgtacctggcattgataacttaaaccgatagacccttttgtttaaagaggcatgctgcttctcctccccctccgtaatcctcccaccttttctttgcctgtatgactactccatttaacacttgaagtctggggagtaaaatctttttctcctgttcagtatgcttagtaggaattttgttttggtaaaagtgacatttcagcttcattcattcagcagaaatttgagtgccagacattgtggtcctgctggaatataacaataaataaaagtccctgtggtcctggagcttataacatgctagctggggagtggtaagggctatagagaaaaataattcagagtgtaagggttggggaggaggtttttcctataggatgataagagaaggtcattctcataagctgatgtttaagcagagaccgaaggaagtgaaagagcaacccaggtggatatctggggaagagtgttcaggcagaggaagaagccagggcaatcgcccttaggtgggagtatggctggtgtgtttggagccacaaagagaacagagtggctgttaatggagtaggagggagaattaattatagcagatgaggttagggctatgtgtatgggtgaagtatgtcatcatgtatggccttgcttttatttttattttattttaattttattatatatcttgagatggggtcttgctctgtcacacaggctggagtgcggtagtgcgatcacggctcactgcagccttgacttcccaggctcagtggatcctcccacctcagctttccaagtagctgggactacaggcactcgtcaccatacctagctaatttttgtatttttttgtagagacaggatttggccgtgttgcccaggctggtctcgaactcctgggctcaagggatctgcccgacttggcctcccaaaagtgctaggattccaggtgtgagccaccatgctgtgtctgggacttgcttttaaatccgtgatgttggggctattggcaagccatttggaacttgggacaaaattaagctgtattcatcctacccatctaagtaatcttttgataatcagatatttaaatgtaaaaattaaaaaattctaaaatgagtaagagaagatatgaatgaatatatcagtatggtgggagttgctctgaaccatttgtggttcaggatgctgcctgatttgccagaagaaaaaaagtaaaaatattagcatggtgataagttatgaagccaaaaagacaaagaaaaagttttatatatttgattacctgaaaattaagaacttctcatgataaataaagtcagagggcatgctggaaaaacattcccaatacactgcaatagacttagtttctttaatgtctaaagagctctttgtcattaagtaagaagtcattaagtaaaaagaaaactaatagaaaaatgagaaaaggaaatggaacaggaagttcccagaaaaggaaataaataagcggccgataaacaaatgaagaaatagtctgttattaaatgaaagtaaatcagaccgagtgcggtggctcatgcctgtaatcctagcactttgggaggccaaggtggcagaccacttgaggtcaggagttcgagaccagcctggccaacatgatgaaactccgtctctactaaaaactacaaaaactatccaggcatggtggcatgcgcctgtaatcgcagctactcaggcagctgaggcatgaaaattgcttgaaccagggaggtgtaggttgcaatgagctgagatcaagcccctgcactccagcctgggtgacagaaccagactccatctcnggaaagaaaaaaagaagaagaaagaaagtaaatcagaccctgagcctagggtcagtataagctatactttgacccatgagacctgtgagataataaatatgtgtgttggaattgttttgtatttatttgatgaattgagatagcttccattatacaaaatagaacaaaagctccccaagttatttattttttttaactaaatcagagcaaggagatgttaactttatctataagattggcaaaagtcaatacaaggggtaatatccaaagttagtgtatgggaaaacaagtatactcntacgttgttaatagaaattgatacaatttctttggggggcattttgacaatatctgatgacatttataacgtatattcccttaaacatggcagttttgttctaggaatttatcccgtagatatactcagagtacaaatgggtacatactgaaaaggcagtctccctatttacatacccttttccctgggtcctttcctaggggcagcctctattaccgtctcttgtctgttgcatgtcccctttgctcatagtaatactagcacactagacatcaacttaatctgtggtttactttttttaaacttaattatttatcttgaagtgtttgtgtgtctgcacaaagcttttcctcattcttttctaattgattgcactgtatttcattatgtgaatgaacagtaatttactttttattatggagaattccaagcatttacaaatacagaatagtataatgaactatactgcatatacccatcacccaccttcacctgattttagttcatggcattttttaaatctatacttttcatcccaacttcctggactgttttgaagcaaatgccagacatcatatcattttatctattttagcatgtatctctcaaagataagcctcttttagttactatttaagaattttattaaatacatacagtaaaattaactttttatggtgtaaaattatatgcattttaaaaactttattttttattgtggtaaaatgtatataccgtaaaatttacagttcagatagttttttaagtgttctgttcagtggcattattaagtgcattcacattgttgggcaactgtcaccaccatctgtatctagaacttactcattttctaaaactgaaactccatgccttttattattttctgcttctaggggtcagaaacatgcctattaaacactaattccccatttctccctcctcttagcccctggaaacaaccattccgccttctgtttctatgaattcaatatttctagatacctcatacaagtagaatcatgtaatatttgcccttttgtgtctggcttatttcactttacataatatcttcaaagttcatccatattgtagcatgtgtcagaatttgattcctttttaaaggtgaataatattccattgtatgtatatactacattttgtttttccattaatgtatcaattgacatttggcttatttccatcttttgtttattttgaataatgctgctgtgaacatgggtataactagtatctgtttgagaccctgctttccattattttaggtatatgcctagaaatgcaattgctggatcatatggtaattttatgtttaattttttctttttccttgtgggttgtcatcatgaaattatattgaattttttgaggaactgctgtactcttttccagttatatgtgttttaacataggtaaatttttgtaaccagcacccacattgggatttagaacaattccatcacgaaaaactccctcttgctgcccctttgtagtatgttttagtaagtagaaaaggagcagagttaaatcttcagagaacaaaatgtaaaggaaaggaacaggatgtttaaatttaggaggccctcctttttgtagatggtatattggtggattgtggtacgtggcccagatctgcctttggctgctaggagagctgccttgcccaaactcctgtcttcttagggctgccaccatccagtgactgatatttgcagagttacaaagtctgctccttggccccagcttggtcagttctgaagggccttcctagctccagagttgcccatggttttggctgaggtcttgttgaaactctttgataagtcagcttctctctctgcccactcctgctcttccacaaaggttttcccaaaatcacttcccaattctttaaatttccatctccatctcagaatttgcttcccaaggaacccaatttatgacacatttttattaatttgcaaagtctgtaactacaaagcaaaaaatgaattaaacttgagcatttttatatgtcagagtttaagaatgtatcattgtttggatagtacatcttttcagaagcaagcatagaaatgggtgaatgagcacgtcctaggctttttttacccttctgaatcaagaacagatgtcttctgatagtaaaaaaaaaaaaaaaaaaaaaaaagtgcaggctcactcctggcccagagctcacacagcaaatatatttttggtttatgtaaaagaggctattgctaatctgtgctgttcttctctttaacagaaccacagaataagagaactccagatttgcctgaagaagagtatgtgaaggaagaaatccaggagaatgaagaagcagtcaaaaagatgcttgtggaagccacccgggagtttgaggaggttgtggtatgttaactagatttactcattatttttttccctaccttcattcttctttgaaactggttatcctgtacacctttttcatctacctggggctcaggaaagtgagagaggagttcaagatggaaagggaaaatggaaaatgggactgatctgggcttcagacatgttgccctgaagcttttgcttcacaaagcttttagtttttggcaggacaagttgagggggaaagggagaaaaattgggtagaatagggacagttgtataaacagtataaagcatcccactttgagtactttaatgtcaatatatttttcaaaaagtttatagtaattgttttttctatttttttgagccagagtctggctctgtcgcccaggctggagtgcagtggtgcgatcttggctcactgcaagctccgcctcctgggttcacaccattctcctgcctcagcctcccgagtagctgggactacaggcgcccaccaccatgcctggctaattatttgtatttttagtagagacggggtttcactgtgttagccaggatggcctcgatctcctgacctcgtgatccgcccgccttggcctcccaaagtgctgggattacaggcgtgagccaccgctttttgtatttttttgaggtggagtctcactctgtcacccaggctggagtgcagtggtgccatctcagctcactgtagcctccacctcccaggttccagcaattcttctgcctcagcctcctgggtaactgggattacaggcatgtgccatcatgcccagctacttatagtaattttttttatcaagcaaatttagctttttgtgtactttgagctttttaaaaatgttttagctcttccatattcagtctagcttatattactctgttagaatctgatatttaataatagctacagagaaagacaggagccatacaataatgataagttttttaaaggtccaaattatatgtatatatttttccatgataaagcgtcttgtgaactaacaaagaaaattcatattaacaaagaaaaatggttaggcttcagtccaaacaagggaaataatttaaagcttctgtaattggtgagtgaagggatgcacaggaattgaagggatgcacaggaattggcaggatttagggattgttgccttttgtagtctgttttattatttgatatttggttcatttttcataaacttcaaacactcagctctcaaacatgacctacctaggcctcttctcatatagcatgctttgtaatctgtctaaccagtatagcttggaagccctaatacattcatacagcagtgctttttgagtacttactatgtataggcattggtgggtattggagatgtggtgatgaacaaaacatacaattcctgcccttaggagcttacagtcttgagagtgaagtcaaacatttaacaaatctaatgaacatgtgtgcacatatatgtgtctctctctttatatatacatatatttttcatattcaatgtagcttctaatattctattggaatactatagtcaattatacacacatatacacatatactccccctacccctcacacacacgtgcacacacacacgcgcacacacacacgcgtgtacatatacatacacatctgacatgaataaatgtaagaaggaacacagcatattaagaggaactgaaggaagtccagtgtgattggaatgcagagggcaagggggtgatagttggaagagaccagatattgtaagaaatcaagacttggtgattaggagctggttttactcatcattctgtctaggtggatgagagccctcctgattttgaaatacatataactatgtgtgatgatgatccacccacacctgaggaagactcagaaacacagcctgatgaggaggaagaagaagaagaagaaaaagtttctcaaccagaggtgggagctgccattaagatcattcggcagttaatggagaagtttaacttggatctatcaacagttacacaggccttcctaaaaaatagtggtgagctggaggctacttccgccttcttagcgtctggtcagagagctgatggatatcccatttggtcccgacaagatgacatagatttgcaaaaagatgatgaggataccagagaggcattggtcaaaaaatttggtgctcagaatgtagctcggaggattgaatttcgaaagaaataattggcaagataatgagaaaagaaaaaagtcatggtaggtgaggtggttaaaaaaaattgtgaccaatgaactttagagagttcttgcattggaactggcacttattttctgaccatcgctgctgttgctctgtgagtcctagatttttgtagccaagcagagttgtagagggggataaaaagaaaagaaattggatgtatttacagctgtccttgaacaagtatcaatgtgtttatgaaaggaagatctaaatcagacaggagttggtctacatagtagtaatccattgttggaatggaacccttgctatagtagtgacaaagtgaaaggaaatttaggaggcataggccatttcaggcagcataagtaatctcctgtcctttggcagaagctcctttagattgggatagattccaaataaagaatctagaaataggagaagatttaattatgaggccttgaacacggattatccccaaacccttgtcatttcccccagtgagctctgatttctagactgctttgaaaatgctgtattcattttgctaacttagtatttgggtaccctgctctttggctgttctttttttggagcccttctcagtcaagtctgccggatgtctttctttacctacccctcagttttccttaaaacgcgcacacaactctagagagtgttaagaataatgttacttggttaatgtgttatttattgagtattgtttgtgctaagcattgtgttagatttaaaaaattagtggattgactccactttgttgtgttgttttcattgttgaaaataaatataactttgtattcgagtctcgtcaataa

SEQ ID NO: 2073 - DNA, 868 bp, Homo sapiens
actatgtataggcattggtgggtattggagatgtggtgatgaacaaaacatacaattcctgcccttaggagcttacagtcttgagagtgaagtcaaacatttaacaaatctaatgaacatgtgtgcacatatatgtgtctctctctttatatatacatatatttttcatattcaatgtagcttctaatattctattggaatactatagtcaattatacacacatatacacatatactccccctacccctcacacacacgtgcacacacacacgcgcacacacacacgcgtgtacatatacatacacatctgacatgaataaatgtaagaaggaacacagcatattaagaggaactgaaggaagtccagtgtgattggaatgcagagggcaagggggtgatagttggaagagaccagatattgtaagaaatcaagacttggtgattaggagctggttttactcatcattctgtctaggtggatgagagccctcctgattttgaaatacatataactatgtgtgatgatgatccacccacacctgaggaagactcagaaacacagcctgatgaggaggaagaagaagaagaagaaaaagtttctcaaccagaggtgggagctgccattaagatcattcggcagttaatggagaagtttaacttggatctatcaacagttacacaggccttcctaaaaaatagtggtgagctggaggctacttccgccttcttagcgtctggtcagagagctgatggatatcccatttggtcccgacaagatgacatagatttgcaaaaagatgatgaggataccagagaggcattggtcaaaaaatttggtgctcagaatgtagctcggaggattgaatt

SEQ ID NO: 2074 - DNA, 166 bp, Homo sapiens
tttttttttccttcaagaaaatatttattgcatattattagtgattatgttttacagcaaaagtaaacacatacacttttcacaaacacaaaatgggaatcaaggcatctatcaaatgtaaatgttgaaccaagtcctggttttcagaattcagcagccaatcctg

SEQ ID NO: 2075 - DNA, 172 bp, Homo sapiens
agaacagaaatttattttctcagttttggaggctgggaagtctccgatcaaggtgccagtacttggtgtctagtaagggccttcttgctgtgtcctcctgtgacagcaagtggaagggcaagaggaggacactgccgcatgaagcctcttttataagggccataatgccatt

SEQ ID NO: 2076 - DNA, 248 bp, Homo sapiens
agcctagagtgacttgcttagcttcactatacatagtggcatgggtcttccaagtccatcattctactctatatcctgaatgtggccagaaattttctcacattgttagccttaaaacacagtttcagacctgttggtaacatcactggccaacaaatgcaagagaaaaaaagaaaagttaataataaagtttgctattttacaagtaagagctatagtttctttatcttacaatttttaaaaaattt

SEQ ID NO: 2077 - DNA, 299 bp, Homo sapiens
ggtgaaagtgcatggatttcagggggaatggggcatcacccatgcagtgagagaagtggtggaatccaagcagtcaagcttagctttgactctgagcaatgggaagctgtagaaaggtttgaagcaagggactaaccgggccagattggtatttaggaggaccactctggtagctggggtgaaagaaggttgggggcatgaaacactgacctaaagaatgtacttcaggctgggtgcggtggcccacgcctgtaatcccaacattttgggaggccaaggcgggaggatcacctgaggtc

SEQ ID NO: 2078 - DNA, 299 bp, Homo sapiens; identical to SEQ ID NO: 2077

SEQ ID NO: 2079 - DNA, 3695 bp, Homo sapiens
acttgtgcaagttacttcacctctgagcctaagtttccacatctgtaaaaggagataataaacacctaccttgcagtagtgaagcaaagagaaaattaaatatatatgaagcaatttggctggcatctagatcattcacagccctttaaaggtcacctttgctgttctccccactttacagataaggaaactgaggcccaaaaaggtttgaacccaggtcttccaagtcattcaagtgctttctccactgtacaggtggttatcaaccttggctgcgcatcagaatcgtttgtaaagctttttctttttcctttttaaaaagtaaagcaatatatacacaggtaaaaaaataaaatagtacagaagggcttataatgagaagcagcagttccctgcttgcacccccacatccaaaggatgtggagctctttaaaaataaattgctctggtcccacctctggaaatctgattcagccagcatggataataacccagataactaacccctacctcacaggataaaaaggattacatgagatgccttaggctaaggccctggcacacaggaacacatgtgctacaaaggagctttggggacttaagtcctgaggatccaggaggtgaggtgacttgtccaagattccactggtttagtggcagagcctagacttccactcggatctatttagtgcttgccccctgctctctcctgtcgtgccccaccacctcctggcatcacagggcaaccgttgtcaaggctatgctcacgggaggctgggcaccacagtgtttccaagagcaagctggatccgagtagattccctagggcttgttggaggaactagtttgactcccttatactgtggacgcagtagccttgctgtagggagttgaagagtactccacaacagtatcttaagtttaactgggcacttccctctggaaatcacagtgttgtgcaccaggaacacaaagatgagtcaaatctttatcctgcctttgaggagctcactgtttagttggggaaaccatttgtaaaacagccattaaccatacagtgtgatcaacactgacaggagcacaggaaaaacatctagcttatgtgaagattcagagaaggcatcctgtagtctaggtggtgatacctgaactgagtcttgagggacgggtaggaattagccagttgaggaagtagaaggaatttccagatattggaaacagtatgcatgaagacatgaaggcaagaaacagcaaaacaaatactgaagcatgaagattcctggggtggggggaaagcagcaagaaaaggtagagaggaaccagattggaagagggtcgtaaatgcatggctacagaattcagatttgttttgtaggacagtgtggttcccaaactggctgtataccacaaacaggtacggcattctgggccccggcccctaaaacattcattaagtctggggtgaagatttggaatcttgaatgcttataaaggttaccacatgactagggtacagccagatttggaaaccatagcttgaaggcagtgagggagccatgaaatggtttttaatagggggactccagatcagatgtgaacttaacctgtttctggctggctagccaaccagcatggaaaacagattaggttagatgttcatgctgtatgtgcccgtgcctgtagcttccctgttaatcagcttcttacactactatatttgcttattttgtctctgaataagctttaggcaccacaagggtgggcctggggatattttgcttaccagtatagcccctgcaaaaaagcacagtgcctgacacaaaacaggcacccagtaaagtttttgaatgaatgaatgcatgagtgaatccatttgtgagagagcgaatggagatgacaagattagctaggagactggaaaaagaccaggaggcctgcactagggcaaaggccagtaggaatagattggaggtgttaaggtgtgaactgttaaggtaagatgataacttaatgactgattattggatgtggagggtgactgagaggatagaatgagtacccatgaatagccatgattcctaccctgtcccagtcatctctttccttatccatctctgaaacaatctgcttacatcctcctcagcaactggaattcctcaagttagttagacattctgtgtgctgtgtggtctctcactgcccccccactccccacccctccacaagccattgattcattcatccagttcaataaatcttggctaagcacctccagtgtgcagtaaggctcttccaagccaggactctgactccctctttcctacctcaagagatgtttttgagggctttcccaggtaagagtcacatctcttatacaataacttatagtgagatacccagaatgtcagacttgtaagggaagactgcccaaaccccttctgaggtcctcagaggggaattaacttcctaaggtccgactgctaggaagtgttggagccagaaatggaacctaggtttcctttctatgtcatctctggagtcttgatcttgatctatcccattgtagatcaggacaggcagaggtggtcagggagaaggtgggacttaggttgaaccttgaaggtcaatgtattggacaggtcaaacaagatggttgccaattacactgcccccttctggaaacccttagcaaacctgccatgcttgcagtcccttctaaggggtttccttagcataagttgccatgctctgtaccatgtgacctcacaatcctggccacagatagctagatgtggatagtgtctggttcaagggcaaccaatctctaggctggccagtggcctgttagctggactggcataaggacttcaccttacaggggtggcatgtatcaaatggcaaatgtatgaaacaaccagatctttcagggaggcagaatgtgagctattcagaagaagtgaacgttaattagaatttaatgaggcattagtggtggtggatgaggggtggccagaaactaaacagcaaaagcaaagagaaagctgcagaaaccataagtaagcagaggtcatgagacatttgtataatgagatcacggagccacagggtggcagaagccatgaagcagcaaggcaacaatgggctagaagccatgaagcaataggagccacgaggaacagaaaccgtgagacaaaactgactatgagatccacaaagcagcagaaggcttgaatagataagatcatgagacagtagaagcgatgagactgcaagaaccacaaggtagccagaaccatgtggcaacatggcaacaggaatggaagaggcagcaggagctacaatgcagaaaagccatggattaataggaactgaagcgccgggagccatgaagctgcaggacccatgaggcagaaaaagccatgggctagcatcgaggggggcagaaagaagttagtcagtagcagtaggaggagtataaatacagccagaaaggagttgagtcaccaatttgggaagcactagagaagggagcaacagatgcctgcagctgagggggtgacaagataagccaggctctagagctgctttggatcatgaaccattttcaagtttctgttcttccatgaggctgcctgtgtagctgttcttgtcttccttatttccctgtgaatgctttaataaatccccatcactaa

SEQ ID NO: 2080 - DNA, 450 bp, Homo sapiens
aacaaaaattagccgggtgtggtggcgtgcgcctgtaatcctagctactcgggaggctgaggtgggagaattgcttgaacccagcactccatcctggacaacagagtaagactccatctcaaaaaaaaaaaaaaaaaaacagtacttgaaaaaagtacatttgccaggcgcagtggctcaccctataatcccagcactttgggaggccagggcgggtggatcacctgaggtcaagagttcgagaccagcctggccaacatggcgaaactctgtctctactaaaaatacaaaaattagccgggcatggtaccgcatgcctgtaatcccagttattagggaggctgaggcagaagacttgcttgagcccagggggcggaggttgccgtgagccaagatcacgccactgcactccagcctgggcgacagagcaaggctccatctcaaaaaaaa

SEQ ID NO: 2081 - DNA, 450 bp, Homo sapiens; identical to SEQ ID NO: 2080

SEQ ID NO: 2082 - DNA, 3695 bp, Homo sapiens; identical to SEQ ID NO: 2079

SEQ ID NO: 2083 - DNA, 1235 bp, Homo sapiens
cttaccagctagggaggaaggaatctgtaatcattttagtatagagaggaaaaaataatctgagcacttgtggtccctccaaaggcaggattatattattgatttttagtctgttcaagctgttcaagatcttctcatttaaccccctcattttacagcgctggaaacgataacagagaaggaacgtaagactttcccaaaggcacatagctatttgtaataggactggcatgtgtacagttatatgaaaattctactaaaaatcattacaattataaataaaattgggtggagggtggagaatcaaagttgagggttcaggtacctgggataccttaggtttgattctccttcctgtcagtgctatatatgtgacatgattgtacatctcctatacttactctcccatttacattttttcaagaaatcatcttagggactacctcaaatcctgtgcttactaagaatggcacgtctagttctgtacaggatcgtaccacggcatcttacaagaatagtgatatatcttctgatgatcagtggatcaatatataaggctataaagagcctgctaatgttttcctcttactctggagatctgatagcataacatgagtcagcatagaggctctgagaaaatgagaaaataacagacctattgttttgttttgaggatcacttaagcaaatatgtaaaatcagatcacatagaataattccctgacctcagtgagtcttctttctaaactgcttcctgtctgcctcacccatctatttctgcagttccacccactgcagttttaaagtgactttggatagctgggtgaaaaggaagagggcaatacattaagactcagttaatataatttgcataatgaaattgtcaaagtgttcttggcccaaaaaacttgtttataaatgaaagtgaaagggttgaatggataatttgaagagagtgccttttcggctctatatattcaatcataggatgtcttgccactgagtcagcaaaggtttttctccaacctactccattaaattttattttacgcattctttttttaatacatataagtatttaaaattttgaaatgtcttagttgtgcttcttaaatgtaaagtgcatgctatcccatttgatagcaatttctgcataagcctgtaggtgaataaaacagaacttcataatacgtggaatatatcggatatacacatttgtggtaaccttagatatta

SEQ ID NO: 2084 - DNA, 1235 bp, Homo sapiens; identical to SEQ ID NO: 2083

SEQ ID NO: 2085 - DNA, 427 bp, Homo sapiens
aagggatataatagcaaatggtgacatttgattatcaaaatagtagtggaagttctagggctgaggtggcttgccaaatctacttacttcattccaggatcaggagagaaacaagacaatggctttcattcagtatgcttgaaaccaaatgattttatctttaacatttgaaataacagagttttctagacaaacactccttcttccagaggttaatcttaattgagatagcactccctggtttattgattccttgcttgggtcgtgaagaagccccagttgttggttcaaagttgatagagactttgctccctagatcacctattttagcgtcaggcaggacagcttagtagtcaagagctctggagtcagactgtctgggtttgaattttggccttgttcagtattaactgtgggatcttgagaa

SEQ ID NO: 2086 - DNA, 276 bp, Homo sapiens
ttttttttttgagacagagtctcgctctgttgtccaggctggagtgcagtggccctgtcgtggctcactgcaacctccgcctcccaggttcaagcaattctcatggctcagccttccgagtagctgggatcacaggcgcctgccaccacacccggccaattttttgtatttttagtagagatggggtttcaccgtgttggccaggctggtctcaaactcctgacctcatgatctgcccacctcagcctcccaaagtgctgggattacaggcatgag

SEQ ID NO: 2087 - DNA, 427 bp, Homo sapiens; identical to SEQ ID NO: 2085

SEQ ID NO: 2088 - DNA, 7347 bp, Homo sapiens
acgagaaaaagataaagaaaaagaaaaggaaaaaaatagctgtgttattttgtaacaagtgttggcttctgttggaaccacctatatgtcttgagaaacaaaaccacaggaggaaaggaagaaaaaccgatcaataccgtctgtgcctgatttcctaatggattttgttcgttttttcaggggaacggttgttacttagttacaatcagactttttcaagtcacacaatacactctttatgagctggagtttcatgttacaagttggaaatgctgtgtgttgtcattcatgaaaaatactgcacttgtagccagattagcaaatcacagcaaattttgtgtcatagtgacattcataactcatatcagttagtaagctattatatcttctgttctaacaatgaatggaggtaattgatttagtctgattccttcctgaaatctaaatattagcacaatagtttctgaaattttacaatgttaaattatgatctaattcatgagaaaccacgggtttaacatagggattcaaaaaaacaaaaacaaaagaataggaataaataacccttaattgtatattggactagttcagcccttaaacagctttacctttatttaggaatgtacattttaggtattatcttgatcatggagcttagatttaatttagatagcaaaaataaagatttgtatttcttttccaatagcaaaaagttacataacactaatacttataacctatcaatatcagatattaatgactttgtagtgttgtaaaattttgaggaattttggagtctttatcataggtaacctggaccacagttactatttattgacaatgtgattgagtgtatggaggaaagcacagtggatgctaggctttgtaaatatggggatgtagaaaagcagatagttcagtgtctacctttttctagaactaccttgaaccttaaattttaagtcatgttcattgctagaaaattaaatgtacttattaaaaccaatgaaaaagcacatttctgaaatgaagttagagataatctttgtgtcttataaaaagacattaataaaaatctgaaagggccgggcgcagtggctcacgcctgtaatcccaacattttgggaggccaaggtgggcggatcatctgaggccaggagttcgagaccagcctggccagcatggtgaaaccctgtctctactaaaaatacaaaaaatcagcctggcatggtggtgcgtgcctgtagtcccagctactcagggctgaggcaggagaattgcttgaacccggcaggcagaggttgcagtgagccgagatcgccctgctgcactccagcctgggtgacagagggagactccgtctcaaaaaaaaaaaagtctgagagtagctaagaatttatgtaaaagcaatcagagtttttaatttatgggaaccaaataaaactataacctcatagtgtttataagaactcagaaataatatttatttaactttattatgaggccacacatattttcctgtgtttctatatatagtttggaaaactatccttaatagtctgttttatatgccttatatttaaaagtttgttttagttattttgaaagactattgctgctgcaaatagttgtgtgctttacattctaagcttcagtacatttatttaagagcatcataatctgacctgagcatccacttggagagtgttttttttgtgtgtggtctggggtgacaaaagaccacaaaaatgtgtggtctggattttttcaactatgtcattaactttatgatccaagaccagttataggatgaatctgtatgtaaaaatagagtcttatttatggaaggaattattctaagggaaaaatccagggtcaagctgtatcttttatgtcctttatattgcatgtctatttctgttacacaatttgttatttcttcaaatttcctatggtagcatgataaatcatcaaagaacctgtttgggatataaaactctgatagaaaatatttaatgagtatcttgattataacctagaatatgtatacgttagtaaaataaccagatatactacagaactctctattggctcaaacaggttgacctcaatccaagtttactcttgatatcactctgttggctgaaggaggtaactcaaacctcagggtttgtttttcccgggacagatagtagtgatagtgcattatatttgaataagaaaaacaaaccagtataccttgagaaattttaaaaagcatagttgaggcatattttttcataattatatacttatctgtttattgcccatggaaaatatatgtgtagaagtatttcttctgttatttgttactatcttcttaatttgttccaaagaaaatgctgccatactgcattccctctggaaggaaacaaaacaaaacaaaactcactcaaaaccagcagtgctgctatcagataagtagatgtcaatgtatacttacaaggaaaaactaaaaaatgtaatgtgttaattcagcctttttctatgtaatatttccaagtcagactttcttacattcctggaatttactttgatataccaagaataataatgataaaatgtttgctttgattactgtggggggaaagatgaaatgttcaattgtattaaaacaaacaagcttttcagagatactggtttcctgcccttgaagggtataaagaatttagatcatgcctgtaatcccagtactttgggaggccgaggcaggtggatcacctgagatcaggagttcgagaccagcctggccaacatggcaaaaccctgtctctactaaaaatacaataattagccaggcatggtggcgggcacctgtcatcccagctacttgggaggctgaggcaggagaatcgcttgaacccaggaggcagtgattgcagtgagctgagatagcaccactgcatgcaagcctgggcaatagagcgagactccgtctcaaaaaaaaaaaaaaaaaaaaaaaattagagctattgtgtctttattttcttaaattttgcccaaggtaacgttatatatcccaccacttcattgctggtttgggtacataggattttgaaagtggtatattaaagtctttccttccaagtattttgtaatacttgaaaattcttagatgtatactgctaacaaaagttagaacttaaacatttttgtttttatcatttatagcctagattagggacatatttgcatcaaccaaatcatcattagatttgaaaataggcagatgaatgaacaaatatggtcattgcactttccttttactttcagagtctaagtatattccttaaggttagtaaccagtctttattaaaaatataaaatttttcttcatgtctaatcccattgcatccacaatgctgtgatttatagtacatgatcaacacttaaaagtactttacatatgtgtgtttctgaagcaagttttcatgacctctgttagattctcaaaagaattcagaacttcaatttaagaatcaccattttaagaatacatgtgtacatatacacattaagcagtataaagcagctaaaattggcattggttttacactggtgcagtgtgcttaggtaaagtaacttcttccatgtttcaaggtcaggttcagagttgaatgaagtgtagatttaaatttaggattaggctttggaatatatcttgtttttattgtctcacatttctgatattgactacttatcccatattctgtttcaaattctttatcatatttcaagttctttctcatacttcttgatcttggcttaactaagcaagttagtatcagagactagttgactgaacccaagattaaacattttgcacttgcacaaaaccttcttagcattttgctttcaatgaatcagaaagtcaattcactaagagacagatcatgagaggaaagagaactagaggccaataaataaaataattgttcatatattaatgttcacatgtgaactacatatctaaaatcttggagaaaaatcaaggcaagaatttccagaactgtcctcaaatagctcatttatttaagttttgttaaaaagcaaaagcgaattgattacatttgattaacttttcctattccatgcacaagttaccttaaaacatgataaaaaccttatgggcattacctatcacacagtacttatgcataaacttataatagtaaaattactaatgtttgataaaataagatggaggcattacaaatagtctacagtttgtattttaaggaattggacatgaagaattctagatcattttgtgtctataaacccgactttctatcttgccttgggcaaactttctgtgcctcaatgtactctttaaatatgtgaaggatgctctttttgattaagtgttttgcactcctgaataaagggcatagtataagcacaaagtatgacttaatttatcacaaatattacacatcctatgttcttgaatgtgcacacttttttctcaataacaaaatatatcttaagtcagtttttttaatgctgtcaaaatttgtagaattttctttgagtatggcatgatctcttcccaaatgcattttacagttttttgtgtgttctatagactatagagtcaaaatcaagagtattttgagaggatcagaagcatttaaaaatctatttttttctagtatctttcacagatctaaatatttagattctctttgcctttttctccatggaatacggtggtatcaaattactaatacagtatataaacttcgtttgcattggtggaattcatttagatctctcaagtaatattattttagggctatataaattgtgtttttagtgtaaaatgttatttgataatgtgaagttaaatcccttttagaaagtgactgaaaatggtaaaggaactcatcagaatcttagcgttcttaagttctctgataatttagtatattttattaatgatgtccaacacctctaagattgttgagaaaacatgaagaattgaggttactcttctcaggtgacactttaaatattaaaatcagaggcttcctgaacaaaacaaattgcaaaatagcgataatggcatgggagaggccagatgcaggactctggtaaatttaacttactttgaatatctatgtaaattttagttcatgcatgttcttacttaatcctggtgtttttgctcttagatgttagagtttaataaattgtgatacgcatatatttttttacatgaaggattctactttctaattttacttttctgatctcaagaaaattaaacttgaaaaacggggtaaaattcttcaactattgcctcaagttcagttttgtcctattgtcctgagaaaggagatttagacttgtctgcctaacacaggtattttttagggcatcgtactatcccagagaaagtgttgagataccatggcagaaatataaaacctaagctttgaaccccagtagacttcttcttctgccattaagtctctctttatctgatattctaaggatttcttcaaactacttaataatttgtcaccattaactttaatatccagttttaatctgcactgtaatatcctgctttgagaagaaagaatgcctcataaattagagaagtacaaaacaaaatgttttggaaggtgatcctggctcctttggctctcataattgttttatagctgaaaataaaaagtcaggaaactggcccggtgcggtggctcatgcctgtaatcccagcactttgggaggctgaggtgggtggatcacctgaagtcaggagttcgagaccagcctggccaacatggtgaaaccctgtctctactaaaaatacaaaaaaaattagctgggtgtggtggcacatgcctgtaatcccagccactggggaggttgaggcgcaagaatcgcttgaacccggaaggcagaggttgcagtgagccaagattgccccactgcactccagcctgggcgactgagcgagactcttatatctcaaaaaaaaaaaaaaaaaaaagtcaagaaactgaaattcccatttaagttctcaaatcagtgatctgtcaaaataggccttgtaactgaaataccttacaaagcagttctaactaatgcaatgtgttttttaaaaatttttaatgaaccttacattgtgaacataattgcaacatgttttaagacaaacagtatttaatccttgaagacctgtcttgtatgtctctcaattttgtcagaatttttattattgtttttcacatatgtgaaataagcagttttttcagggtacatagggtatctttgttttacagatttttaaagatgaggttttgaaaagccctcagaggtttttgttaaaagactatcttgcttaataaatgacaacttgttacagattcacacattacaagtaggacagtataacaggagattggtgtgtgaatgctacaaaacagtcagcaaaaggaatcatgtttgcttgtgaaacttcagaggtaccctgaaagtcatttcctaaagctagtgcatgtgaatcttttccttgaattgtgcagaataattggattgaggcacatattttgaggagtagcaagtggaatggtataatgactacagagaaaattatcttgaaatatagcaaggaagagaaacaagttttctttctccactttattgttggactaattgggtcaatttgctgtgacatatcaaagatctctttgtgccaggccaagactggctactgagttctcaaagcgttttaatatatagattacgtatgagtgcctattttttcctcctcctttcattttttatcttaatacccattttacttctgaaataattcatctgttttgctttatgaccagctttaatttcaattgaggaataataacaaccctagagattcataggaaagagcattgaaatacattttttgcataaagatacctaaaaccatctacccagcttagggttgaactgaatttctgtgaaataaatttgttttaaatactaattattttaaaactacttaattcttaaaaacaatgtcatcagtttcaaaagtttcactttgggaggatattccttaaaaggcatacatagatggtaaagtataaaatatttctgacagaattattcagtattattcaacatttactttcatgtttgttattgtaccacaaagatagtgtcattgttgggttaaaatgttggctgtttttgttaatatacttaaaactgtaaccagtgaataacacctgtagtattttttattatagattatattttatttcaataaactttgatatttagaccaaa

SEQ ID NO: 2089 - DNA, 6107 bp, Homo sapiens
cctgtaatcccagctacttggggggctaaggcaggaaaattgcttgaacccggcaggcagaggttgcagtgagccgagatcgccctgctgcactccagcctgggtgacagagggagactccgtctcaaaaaaaaaaaagtctgagagtagctaagaatttatgtaaaagcaatcagagtttttaatttatgggaaccaaataaaactataacctcatagtgtttataagaactcagaaataatatttatttaactttattatgaggccacacatattttcctgtgtttctatatatagtttggaaaactatccttaatagtctgttttatatgccttatatttaaaagtttgttttagttattttgaaagactattgctgctgcaaatagttgtgtgctttacattctaagcttcagtacatttatttaagagcatcataatctgacctgagcatccacttggagagtgttttttttgtgtgtggtctggggtgacaaaagaccacaaaaatgtgtggtctggattttttcaactatgtcattaactttatgatccaagaccagttataggatgaatctgtatgtaaaaatagagtcttatttatggaaggaattattctaagggaaaaatccagggtcaagctgtatcttttatgtcctttatattgcatgtctatttctgttacacaatttgttatttcttcaaatttcctatggtagcatgataaatcatcaaagaacctgtttgggatataaaactctgatagaaaatatttaatgagtatcttgattataacctagaatatgtatacgttagtaaaataaccagatatactacagaactctctattggctcaaacaggttgacctcaatccaagtttactcttgatatcactctgttggctgaaggaggtaactcaaacctcagggtttgtttttcccgggacagatagtagtgatagtgcattatatttgaataagaaaaacaaaccagtataccttgagaaattttaaaaagcatagttgaggcatattttttcataattatatacttatctgtttattgcccatggaaaatatatgtgtagaagtatttcttctgttatttgttactatcttcttaatttgttccaaagaaaatgctgccatactgcattccctctggaaggaaacaaaacaaaacaaaactcactcaaaaccagcagtgctgctatcagataagtagatgtcaatgtatacttacaaggaaaaactaaaaaatgtaatgtgttaattcagcctttttctatgtaatatttccaagtcagactttcttacattcctggaatttactttgatataccaagaataataatgataaaatgtttgctttgattactgtggggggaaagatgaaatgttcaattgtattaaaacaaacaagcttttcagagatactggtttcctgcccttgaagggtataaagaatttagatcatgcctgtaatcccagtactttgggaggccgaggcaggtggatcacctgagatcaggagttcgagaccagcctggccaacatggcaaaaccctgtctctactaaaaatacaataattagccaggcatggtggcgggcacctgtcatcccagctacttgggaggctgaggcaggagaatcgcttgaacccaggaggcagtgattgcagtgagctgagatagcaccactgcatgcaagcctgggcaatagagcgagactccgtctcaaaaaaaaaaaaaaaaaaaaaattagagctattgtgtctttattttcttaaattttgcccaaggtaacgttatatatcccaccacttcattgctggtttgggtacataggattttgaaagtggtatattaaagtctttccttccaagtattttgtaatacttgaaaattcttagatgtatactgctaacaaaagttagaacttaaacatttttgtttttatcatttatagcctagattagggacatatttgcatcaaccaaatcatcattagatttgaaaataggcagatgaatgaacaaatatggtcattgcactttccttttactttcagagtctaagtatattccttaaggttagtaaccagtctttattaaaaatataaaatttttcttcatgtctaatcccattgcatccacaatgctgtgatttatagtacatgatcaacacttaaaagtactttacatatgtgtgtttctgaagcaagttttcatgacctctgttagattctcaaaagaattcagaacttcaatttaagaatcaccattttaagaatacatgtgtacatatacacattaagcagtataaagcagctaaaattggcattggttttacactggtgcagtgtgcttaggtaaagtaacttcttccatgtttcaaggtcaggttcagagttgaatgaagtgtagatttaaatttaggattaggctttggaatatatcttgtttttattgtctcacatttctgatattgactacttatcccatattctgtttcaaattctttatcatatttcaagttctttctcatacttcttgatcttggcttaactaagcaagttagtatcagagactagttgactgaacccaagattaaacattttgcacttgcacaaaaccttcttagcattttgctttcaatgaatcagaaagtcaattcactaagagacagatcatgagaggaaagagaactagaggccaataaataaaataattgttcatatattaatgttcacatgtgaactacatatctaaaatcttggagaaaaatcaaggcaagaatttccagaactgtcctcaaatagctcatttatttaagttttgttaaaaagcaaaagcgaattgattacatttgattaacttttcctattccatgcacaagttaccttaaaacatgataaaaaccttatgggcattacctatcacacagtacttatgcataaacttataatagtaaaattactaatgtttgataaaataagatggaggcattacaaatagtctacagtttgtattttaaggaattggacatgaagaattctagatcattttgtgtctataaacccgactttctatcttgccttgggcaaactttctgtgcctcaatgtactctttaaatatgtgaaggatgctctttttgattaagtgttttgcactcctgaataaagggcatagtataagcacaaagtatgacttaatttatcacaaatattacacatcctatgttcttgaatgtgcacacttttttctcaataacaaaatatatcttaagtcagtttttttaatgctgtcaaaatttgtagaattttctttgagtatggcgtgatctcttcccaaatgcattttacagttttttgtgtgttctatagactatagagtcaaaatcaagagtattttgagaggatcagaagcatttaaaaatctatttttttctagtatctttcacagatctaaatatttagattctctttgcctttttctccatggaatacggtggtatcaaattactaatacagtatataaacttcgtttgcattggtggaattcatttagatctctcaagtaatattattttagggctatataaattgtgtttttagtgtaaaatgttatttgataatgtgaagttaaatcccttttagaaagtgactgaaaatggtaaaggaactcatcagaatcttagcgttcttaagttctctgataatttagtatattttattaatgatgtccaacacctctaagattgttgagaaaacatgaagaattgaggttactcttctcaggtgacactttaaatattaaaatcagaggcttcctgaacaaaacaaattgcaaaatagcgataatggcatgggagaggccagatgcaggactctggtaaatttaacttactttgaatatctatctaaattttagttcatgcatgttcttacttaatcctggtgtttttgctcttagatgttagagtttaataaattgtgatacgcatatatttttttacatgaaggattctactttctaattttacttttctgatctcaagaaaattaaacttgaaaaacggggtaaaattcttcaactattgcctcaagttcagttttgtcctattgtcctgagaaaggagatttagacttgtctgcctaacacaggtattttttagggcatcgtactatcccagagaaagtgttgagataccatggcagaaatataaaacctaagctttgaaccccagtagacttcttcttctgccattaagtctctctttatctgatattctaaggatttcttcaaactacttaataatttgtcaccattaactttaatatccagttttaatctgcactgtaatatcctgctttgagaagaaagaatgcctcataaattagagaaggacaaaacaaaatgttttggaaggtgatcctggctcctttggctctcataattgttttatagctgaaaataaaaagtcaggaaactggcccggtgcggtggctcatgcctgtaatcccagcactttgggaggctgaggtgggtggatcacctgaagtcaggagttcgagaccagcctggccaacatggtgaaaccctgtctctactaaaaatacaaaaaaaattagctgggtgtggtggcacatgcctgtaatcccagccactggggaggttgaggcgcaagaatcgcttgaacccggaaggcagaggttgcagtgagccaagattgccccactgcactccagcctgggcgactgagcgagactcttatatctcaaaaaaaaaaaaaaaaaaaagtcaagaaactgaaattcccatttaagttctcaaatcagtgatctgtcaaaataggccttgtaactgaaataccttacaaagcagttctaactaatgcaatgtgttttttaaaaatttttaatgaaccttacattgtgaacataattgcaacatgttttaagacaaacagtatttaatccttgaagacctgtcttgtatgtctctcaattttgtcagaatttttattattgtttttcacatatgtgaaataagcagttttttcagggtacatagggtatctttgttttacagatttttaaagatgaggttttgaaaagccctcagaggtttttgttaaaagactatcttgcttaataaatgacagcttgttacagattcacacattacaagtaggacagtataacaggagattggtgtgtgaatgctacaaaacagtcagcaaaaggaatcatgtttgcttgtgaaacttcagaggtaccctgaaagtcatttcctaaagctagtgcgtgtgaatcttttccttgaattgtgcagaataattggattgaggcacatattttgaggagtagcaagtggaatggtataatgactacagagaaaattatcttgaaatatagcaaggaagagaaacaagttttctttctccactttattgttggactaattgggtcaatttgctgtgacatatcaaagatctctttgtgccaggccaagactggctactgagttctcaaagcgttttaatatatagattacgtatgagtgcctattttttcctcctcctttcattttttatcttaatacccattttacttctgaaataattcatctgttttgctttatgaccagctttaatttcaattgaggaataataacaaccctagagattcataggaaagagcattgaaatacattttttgcataaagatacctaaaaccatctacccagcttagggttgaactgaatttctgtgaaataaatttgttttaaatactaattattttaaaactacttaattcttaaaaacaatgtcatcagtttcaaaactttcactttgggaggatattccttaaaaggcatacatagatggtaaagtataaaatatttctgacagaattattcagtattattcaacatttactttcatgtttgttattgtaccacaaagatagtgtcattgttgggttaaaatgttggctgtttttgttaatatacttaaaactgtaaccagtgaataacacctgtagtattttttattatagattatattttatttcaataaactttgatatttagaccaaa

SEQ ID NO: 2090 - DNA, 7351 bp, Homo sapiens
acgagaaaaagataaagaaaaagaaaaggaaaaaaatagctgtgttattttgtaacaagtgttggcttctgttggaaccacctatatgtcttgagaaacaaaaccacaggaggaaaggaagaaaaaccgatcaataccgtctgtgcctgatttcctaatggattttgttcgttttttcaggggaacggttgttacttagttacaatcagactttttcaagtcacacaatacactctttatgagctggagtttcatgttacaagttggaaatgctgtgtgttgacattcatgaaaaatactgcacttgtagccagattagcaaatcacagcaaattttgtgtcatagtgacattcataactcatatcagttagtaagctattatatcttctgttctaacaatgaatggaggtaattgatttagtctgattccttcctgaaatctaaatattagcacaatagtttctgaaattttacaatgttaaattatgatctaattcatgagaaaccacgggtttaacatagggattcaaaaaaacaaaaacaaaagaataggaataaataacccttaattgtatattggactagttcagcccttaaacagctttacctttatttaggaatgtacattttaggtattatcttgatcatggagcttagttttaatttagatagcaaaaataaagatttgtatttcttttccaatagcaaaaagttacataacactaatacttataacctatcaatatcagatattaatgactttgtagtgttgtaaaattttgaggaattttggagtctttatcataggtaacctggaccacagttactatttattgacaatgtgattgagtgtatggaggaaagcacagtggatgctaggctttgtaaatatggggatgtagaaaagcagatagttcagtgtctacctttttctagaactaccttgaaccttaaattttaagtcatgttcattgctagaaaattaaatgtacttattaaaaccaatgaaaaagcacatttctgaaatgaagttagagataatctctgtgtcttataaaaagacattaataaaaatctgaaagggccgggcgcagtggctcacgcctgtaatcccaacattttgggaggccaaggtgggcggatcatctgaggccaggagttcgagaccagcctggccagcatggtgaaaccctgtctctactaaaaatacaaaaaatcagcctggcatggtggtgcgtgcctgtagtcccagctactcagggctgaggcaggagaattgcttgaacccggcaggcagaggttgcagtgagccgagatcgccctgctgcactccagcctgggtgacagagggagactccgtctcaaaaaaaaaaaagtctgagagtagctaagaatttatgtaaaagcaatcagagtttttaatttatgggaaccaaataaaactataacctcatagtgtttataagaactcagaaataatatttatttaactttattatgaggccacacatattttcctgtgtttctatatatagtttggaaaactatccttaatagtctgttttatatgccttatatttaaaagtttgttttagttattttgaaagactattgctgctgcaaatagttgtgtgctttacattctaagcttcagtacatttatttaagaagcattcataatctgacctgagcatccacttggagaatgttttttttgtgtgtggtctggggtggacaaaagaccaccaaaaatgtgtggtctggattttttcaactatgtcattaactttatgatccaagaccagttataggatgaatctgtatgtaaaaatagagtcttatttatggaaggaattattctaagggaaaaatccagggtcaagctgtatcttttatgtcctttatattgcatgtctatttctgttacacaatttgttatttcttcaaatttcctatggtagcatgataaatcatcaaagaacctgtttgggatataaaactctgatagaaaatatttaatgagtatcttgattataacctagaatatgtatacgttagtaaaataaccagatatactacagaactctctattggctcaaacaggttgacctcaatccaagtttactcttgatatcactctgttggctgaaggaggtaactcaaacctcaggtttgtttttcccgggacagatagtagtgatagtgcattatatttgaataagaaaaacaaaccagtataccttgagaaattttaaaaagcatagttgaggcatattttttcataattatatacttatctggttattgcccatggaatatttgtggaagaaagatttccttctgaatttggtactatcttcttaatttgttccaaagaaaatgctgccatactgcattccctctgcgaaggaaacaaaacaaaacaaaactcactcaaaaccagcagtgctgctatcagataagtagatgtcaatgtatacttacaaggaaaaactaaaaaatgtaatgtgttaattcagcctttttctatgtaatatttccaagtcagactttcttacattcctggaatttactttgatataccaagaataataatgataaaatgtttgctttgattactgtggggggaaagatgaaatgttcaattgtattaaaacaaacaagcttttcagagatactggtttcctgcccttgaagggtataaagaatttagatcatgcctgtaatcccagtactttgggaggccgaggcaggtggatcacctgagatcaggagttcgagaccagcctggccaacatggcaaaaccctgtctctactaaaaatacaataattagccaggcatggtggcgggcacctgtcatcccagctacttgggaggctgaggcaggagaatcgcttgaacccaggaggcagtgattgcagtgagctgagatagcaccactgcatgcaagcctgggcaatagagcgagactccgtctcaaaaaaaaaaaaaaaaaaaaaattagagctattgtgtctttattttcttaaattttgcccaaggtaacgttatatatcccaccacttcattgctggtttgggtacataggattttgaaagtggtatattaaagtctttccttccaagtattttgtaatacttgaaaattcttagatgtatactgctaacaaaagttagaacttaaacatttttgtttttatcatttatagcctagattagggacatatttgcatcaaccaaatcatcattagatttgaaaataggcagatgaatgaacaaatatggtcattgcactttccttttactttcagagtctaagtatattccttaaggttagtaaccagtctttattaaaaatataaaatttttcttcatgtctaatcccattgcatccacaatgctgtgatttatagtacatgatcaacacttaaaagtactttacatatgtgtgtttctgaagcaagttttcatgacctctgttagattctcaaaagaattcagaacttcaatttaagaatcaccattttaagaatacatgtgtacatatacacattaagcagtataaagcagctaaaattggcattggttttacactggtgcagtgtgcttaggtaaagtaacttcttccatgtttcaaggtcaggttcagagttgaatgaagtgtagatttaaatttaggattaggctttggaatatatcttgtttttattgtctcacatttctgatattgactacttatcccatattctgtttcaaattctttatcatatttcaagttctttctcatacttcttgatcttggcttaactaagcaagttagtatcagagactagttgactgaacccaagattaaacattttgcacttgccacaaaacctttcttagcattttgctttcaatgaatcagaaagtcaattcactaagagacagatcatgagaggaaagagaactagaggccaataaataaaataattgttcatatattaatgttcacatgtgaactacatatctaaaatcttggagaaaaatcaaggcaagaatttccagaactgtcctcaaatagctcatttatttaagttttgttaaaaagcaaaagcgaattgattacatttgattaacttttcctattccatgcacaagttaccttaaaacatgataaaaaccttatgggcattacctatcacacagtacttatgcataaacttataatagtaaaattactaatgtttgataaaataagatggaggcattacaaatagtctacagtttgtattttaaggaattggacatgaagaattctagatcattttgtgtctataaacccgactttctatcttgccttgggcaaactttctgtgcctcaatgtactctttaaatatgtgaaggatgctctttttgattaagtgttttgcactcctgaataaagggcatagtataagcacaaagtatgacttaatttatcacaaatattacacatcctatgttcttgaatgtgcacacttttttctcaataacaaaatatatcttaagtcagtttttttaatgctgtcaaaatttgtagaattttctttgagtatggcgtgatctcttcccaaatgcattttacagttttttgtgtgttctatagactatagagtcaaaatcaagagtattttgagaggatcagaagcatttaaaaatctatttttttctagtatctttcacagatctaaatatttagattctctttgcctttttctccatggaatacggtggtatcaaattactaatacagtatataaacttcgtttgcattggtggaattcatttagatctctcaagtaatattattttagggctatataaattgtgtttttagtgtaaaatgttatttgataatgtgaagttaaatcccttttagaaagtgactgaaaatggtaaaggaactcatcagaatcttagcgttcttaagttctctgataatttagtatattttattaatgatgtccaacacctctaagattgttgagaaaacatgaagaattgaggttactcttctcaggtgacactttaaatattaaaatcagaggcttcctgaacaaaacaaattgcaaaatagcgataatggcatgggagaggccagatgcaggactctggtaaatttaacttactttgaatatctatctaaattttagttcatgcatgttcttacttaatcctggtgtttttgctcttagatgttagagtttaataaattgtgatacgcatatatttttttacatgaaggattctactttctaattttacttttctgatctcaagaaaattaaacttgaaaaacggggtaaaattcttcaactattgcctcaagttcagttttgtcctattgtcctgagaaaggagatttagacttgtctgcctaacacaggtattttttagggcatcgtactatcccagagaaagtgttgagataccatggcagaaatataaaacctaagctttgaaccccagtagacttcttcttctgccattaagtctctctttatctgatattctaaggatttcttcaaactacttaataatttgtcaccattaactttaatatccagttttaatctgcactgtaatatcctgctttgagaagaaagaatgcctcataaattagagaaggacaaaacaaaatgttttggaaggtgatcctggctcctttggctctcataattgttttatagctgaaaataaaaagtcaggaaactgggcccggtgcggtggctcatgcctgtaatcccagcactttgggaggctgaggtgggtggatcacctgaagtcaggagttcgagaccagcctggccaacatggtgaaaccctgtctctactaaaaatacaaaaaaaattagctgggtgtggtggcacatgcctgtaatcccagccactggggaggttgaggcgcaagaatcgcttgaacccggaaggcagaggttgcagtgagccaagattgccccactgcactccagcctgggcgactgagcgagactcttatatctcaaaaaaaaaaaaaaaaaaaagtcaagaaactgaaattcccatttaagttctcaaatcagtgatctgtcaaaataggccttgtaactgaaataccttacaaagcagttctaactaatgcaatgtgttttttaaaaatttttaatgaaccttacattgtgaacataattgcaacatgttttaagacaaacagtatttaatccttgaagacctgtcttgtatgtctctcaattttgtcagaatttttattattgtttttcacatatgtgaaataagcagttttttcagggtacatagggtatctttgttttacagatttttaaagatgaggttttgaaaagccctcagaggtttttgttaaaagactatcttgcttaataaatgacagcttgttacagattcacacattacaagtaggacagtataacaggagattggtgtgtgaatgctacaaaacagtcagcaaaaggaatcatgtttgcttgtgaaacttcagaggtaccctgaaagtcatttcctaaagctagtgcgtgtgaatcttttccttgaattgtgcagaataattggattgaggcacatattttgaggagtagcaagtggaatggtataatgactacagagaaaattatcttgaaatatagcaaggaagagaaacaagttttctttctccactttattgttggactaattgggtcaatttgctgtgacatatcaaagatctctttgtgccaggccaagactggctactgagttctcaaagcgttttaatatatagattacgtatgagtgcctattttttcctcctcctttcattttttatcttaatacccattttacttctgaaataattcatctgttttgctttatgaccagctttaatttcaattgaggaataataacaaccctagagattcataggaaagagcattgaaatacattttttgcataaagatacctaaaaccatctacccagcttagggttgaactgaatttctgtgaaataaatttgttttaaatactaattattttaaaactacttaattcttaaaaacaatgtcatcagtttcaaaactttcactttgggaggatattccttaaaaggcatacatagatggtaaagtataaaatatttctgacagaattattcagtattattcaacatttactttcatgtttgttattgtaccacaaagatagtgtcattgttgggttaaaatgttggctgtttttgttaatatacttaaaactgtaaccagtgaataacacctgtagtattttttattatagattatattttatttcaataaactttgatatttagaccaaa

SEQ ID NO: 2091 - DNA, 2640 bp, Homo sapiens
gagtacgctaccacgcctggctaatttttgtatttttagtagaaatggggtttcaccgtattggccaggctggtattggaatcctgaccgcaaatgatctgcccacctcggcttcccaaagtgctgggattacaggcgtgagccactgcgcccaaccagccttaattcttaataaaggaagttgaaaaataatgaacattggtaaaactattctagtgtgatcagaagcaaatttggactgtagtgtcaaattgataaaaaactaagcacaccaatcatgtataagaaaagtagatttaacatttttttccctaaacacttaacccagaagttaacaataatcttgaaaattccttttaaatccaggccctttaggtgatggcagtttgactcaggatgtccaagtccagtgtattttcaataaaattgacttgacagctactgctctgggtgtaagagcagttgactgtgaggaaaagtaaatggttctacagattctttatgatctacctcccaccagaggactgcagtactcccttgttatttatattttctgccccaatttttgccttctccacaaattttataccttttgtagctgcctactccagattacttcacctttccagactatcagttcttccacttttattcttcataaagaaaattccaataacctgtttcacttaggtttttctattactcttcaagcatgaatcctaatttccctgactatatcttacctctgatctccataactgatggattcctatcctagactatgttactctaatattacccaagattttctccagcctgtttttactcttactttgaaacagctgtttaaaatgactcgtaatctgcttaaatctacatgctttttgtggttctcaatccagttacctaccttccagataattccctcactgtcctgtcctctccattcctctgatgtttaagccctgtgagccacctttcccccatcctttgtgcatagttaccattttactctttcttgttgcccaggcaggaatgcagtggtgccatcttggctcactgcaacctccacctcctaggttcaagcgattctcctgcctcagcctcctgagtagctgggaccacaagcgtgcaccaccacgcccggctaatttttgtatttttagtagagatggggtttcaccacgttggccaggctggtctcgaactcctgacctcagatgatccaccctccttggcctcccaaagtgctgggattgcaggcgtgagccaccgcctggccaccattttactctttttaggtacagtaatctaatatccaaagtcttggactcagctaaagagggtatttaccttaaaaaaaaaaaaaaaaagactccatcttttgattcataattgtggtgggggcggggaatcaagacaaccttagtcactttggtattaccataattcttgtcttttcagggttgtcctgttcagctgcataaaacatcatgtattctaggtatttcctaccttcacttacatttttacttgccgatgtgctgccttcataaatgggtatattccgccacacatctagtaagcccccaatgcagtacacaatgtgtatcactgataaaactcgcacttctgccatgtcagtattatattcagttgagtggtctttagcatagtggcagtcctagtcatcctaaccttttagttaaggtaaaattacatatgtttatagaactcatatagacaagctagtttttaaaatcttccttttaaccagtttaggatgatctaggatagctaagttacctacatggtgactgttcggtctaattcagaaacagaagtactaaaagaatactaaaaagtttttacccattatctctatccctgttttctttttgcaattctcagctgcagggagcaagaaaatacacagcagataggaaatgtttgtttgcatcctggctttctcaaccgcactttacgtccttgaatattctagatatttactccttcaagaagtcaggagtatatccaggcctacctatcatccttgccatccccattaaccctcatttttcagtatgtgttttacatttatggttatttttcagtctatagtatctgttcactcattgctctatcacatctgagtttctccgtctttctttccactagattgtaagctccttaagggcaaggtcggcatataagcaaagttctgtaaacaccgtgaaggtaccatgagttctatgggtactcaataaatgcttgtgataatgatgcaatttctcagatgaactgattgtagtgactacctctaaaagccttcaatctacagtttttaaatttgtctcattgcatctgagttttagaaagccttcgatagaaagggaagatacttcatagcttgccagatgaatgcccatttccttatttccttttcctcacttttgatattttgcccagtgtctggtctggatatctgacatccataagggtattgaaatggatccttgtgtggttttcagataccagttatatatattatgaagcagaggtaacctaatattgtctaacactattgatacagtttatattttggaaatactgtatggatgatttattgaaataacttat

SEQ ID NO: 2092 - DNA, 2639 bp, Homo sapiens
gagtacgctaccacgcctggctaatttttgtatttttagtagaaatggggtttcaccgtattggccaggctggtattggaatcctgaccgcaaatgatctgcccacctcggcttcccaaagtgctgggattacaggcgtgagccactgcgcccaaccagccttaattcttaataaaggaagttgaaaaataatgaacattggtaaaactattctagtgtgatcagaagcaaatttggactgtagtgtcaaattgataaaaaactaagcacaccaatcatgtataagaaaagtagatttaacatttttttccctaaacacttaacccagaagttaacaataatcttgaaaattccttttaaatccaggccctttaggtgatggcagtttgactcaggatgtccaagtccagtgtattttcaataaaattgacttgacagctactgctctgggtgtaagagcagttgactgtgaggaaaagtaaatggttctacagattctttatgatctacctcccaccagaggactgcagtactcccttgttatttatattttctgccccaatttttgccttctccacaaattttataccttttgtagctgcctactccagattacttcacctttccagactatcagttcttccacttttattcttcataaagaaaattccaataacctgtttcacttaggtttttctattactcttcaagcatgaatcctaatttccctgactatatcttacctctgatctccataactgatggattcctatcctagactatgttactctaatattacccaagattttctccagcctgtttttactcttactttgaaacagctgtttaaaatgactcgtaatctgcttaaatctacatgctttttgtggttctcaatccagttacctaccttccagataattccctcactgtcctgtcctctccattcctctgatgtttaagccctgtgagccacctttcccccatcctttgtgcatagttaccattttactctttctgttgcccaggcaggaatgcagtggtgccatcttggctcactgcaacctccacctcctaggttcaagcgattctcctgcctcagcctcctgagtagctgggaccacaagcgtgcaccaccacgcccggctaatttttgtatttttagtagagatggggtttcaccacgttggccaggctggtctcgaactcctgacctcagatgatccaccctccttggcctcccaaagtgctgggattgcaggcgtgagccaccgcctggccaccattttactctttttaggtacagtaatctaatatccaaagtcttggactcagctaaagagggtatttaccttaaaaaaaaaaaaaaaaagactccatcttttgattcataattgtggtgggggcggggaatcaagacaaccttagtcactttggtattaccataattcttgtcttttcagggttgtcctgttcagctgcataaaacatcatgtattctaggtatttcctaccttcacttacatttttacttgccgatgtgctgccttcataaatgggtatattccgccacacatctagtaagcccccaatgcagtacacaatgtgtatcactgataaaactcgcacttctgccatgtcagtattatattcagttgagtggtctttagcatagtggcagtcctagtcatcctaaccttttagttaaggtaaaattacatatgtttatagaactcatatagacaagctagtttttaaaatcttccttttaaccagtttaggatgatctaggatagctaagttacctacatggtgactgttcggtctaattcagaaacagaagtactaaaagaatactaaaaagtttttacccattatctctatccctgttttctttttgcaattctcagctgcagggagcaagaaaatacacagcagataggaaatgtttgtttgcatcctggctttctcaaccgcactttacgtccttgaatattctagatatttactccttcaagaagtcaggagtatatccaggcctacctatcatccttgccatccccattaaccctcatttttcagtatgtgttttacatttatggttatttttcagtctatagtatctgttcactcattgctctatcacatctgagtttctccgtctttctttccactagattgtaagctccttaagggcaaggtcggcatataagcaaagttctgtaaacaccgtgaaggtaccatgagttctatgggtactcaataaatgcttgtgataatgatgcaatttctcagatgaactgattgtagtgactacctctaaaagccttcaatctacagtttttaaatttgtctcattgcatctgagttttagaaagccttcgatagaaagggaagatacttcatagcttgccagatgaatgcccatttccttatttccttttcctcacttttgatattttgcccagtgtctggtctggatatctgacatccataagggtattgaaatggatccttgtgtggttttcagataccagttatatatattatgaagcagaggtaacctaatattgtctaacactattgatacagtttatattttggaaatactgtatggatgatttattgaaataacttat

SEQ ID NO: 2093 - DNA, 2447 bp, Homo sapiens
aacattggtaaaactattctagtgtgatcagaagcaaatttggactgtagtgtcaaattgataaaaaactaagcacaccaatcatgtataagaaaagtagatttaacatttttttccctaaacacttaacccagaagttaacaataatcttgaaaattccttttaaatccaggcccttttaggtgatggcagtttgactcaggatgtccaagtccagtgtattttcaataaaattgacttgacagctactgctctgggtgtaagagcagtcgactgtgaggaaaagtaaatggttctacagattctttatgatctacctcccaccagaggactgcagtactcccttgttatttatattttctgccccaatttttgccttctccacaaattttataccttttgtagctgcctactccagattacttcacctttccagactatcagttcttccacttttattcttcataaagaaaattccaataacctgtttcacttaggtttttctattactcttcaagcatgaatcctaatttccctgactatatcttacctctgatctccataactgatggattcctatcctagactatgttactctaatattacccaagattttctccagcctgtttttactcttactttgaaacagctgtttaaaatgactcgtaatctgcttaaatctacatgctttttgtggttctcaatccagttacctaccttccagataattccctcactgtcctgtcctctccattcctctgatgtttaagccctgtgagccacctttcccccatcctttgtgcatagttaccattttactctttcttgttgcccaggcaggaatgcagtggtgccatcttggctcactgcaacctccacctcctaggttcaagcgattctcctgcctcagcctcctgagtagctgggaccacaagcgtgcaccaccacgcccggctaatttttgtatttttagtagagatggggtttcaccacgttggccaggctggtctcgaactcctgacctcagatgatccaccctccttggcctcccaaagtgctgggattgcaggcgtgagccaccgcctggccaccattttactctttttaggtacagtaatctaatatccaaagtcttggactcagctaaagagggtatttaccttaaaaaaaaaaaaaaaaagactccatcttttgattcataattgtggtgggggcggggaatcaagacaaccttagtcactttggtattaccataattcttgtcttttcagggttgtcctgttcagctgcataaaacatcatgtattctaggtatttcctaccttcacttacatttttacttgccgatgtgctgccttcataaatgggtatattccgccacacatctagtaagcccccaatgcagtacacaatgtgtatcactgataaaactcgcacttctgccatgtcagtattatattcagttgagtggtctttagcatagtggcagtcctagtcatcctaaccttttagttaaggtaaaattacatatgtttatagaactcatatagacaagctagtttttaaaatcttccttttaaccagtttaggatgatctaggatagctaagttacctacatggtgactgttcggtctaattcagaaacagaagtactaaaagaatactaaaaagtttttacccattatctctatccctgttttctttttgcaattctcagctgcagggagcaagaaaatacacagcagataggaaatgtttgtttgcatcctggctttctcaaccgcactttacgtccttgaatattctagatatttactccttcaagaagtcaggagtatatccaggcctacctatcatccttgccatccccattaaccctcatttttcagtatgtgttttacatttatggttatttttcagtctatagtatctgttcactcattgctctatcacatctgagtttctccgtctttctttccactagattgtaagctccttaagggcaaggtcggcatataagcaaagttctgtaaacaccgtgaaggtaccatgagttctatgggtactcaataaatgcttgtgataatgatgcaatttctcagatgaactgattgtagtgactacctctaaaagccttcaatctacagtttttaaatttgtctcattgcatctgagttttagaaagccttcgatagaaagggaagatacttcatagcttgccagatgaatgcccatttccttatttccttttcctcacttttgatattttgcccagtgtctggtctggatatctgacatccataagggtattgaaatggatccttgtgtggttttcagataccagttatatatattatgaagcagaggtaacctaatattgtctaacactattgatacagtttatattttggaaatactgtatggatgatttattgaaataacttat

SEQ ID NO: 2094 - DNA, 585 bp, Homo sapiens
ctcaactcccatactgcccagggcttctaattactattctaaaggtaatctaaattcatttaaatttgtgaaccaatgcaaaaaaatgtgaatgtagctttttggatattttttttgtttactaaggaatgggtaacattgttatagaagcttgcctaagagttttgaaattagttgacctttttgagtttccaaaattgaatcttccattgtagctattaaagtgaactataaataggccaactttaattgttaactcctcgggtttggtggattatctaccatttatatataaaatttcagttagaatccaccattggcgttttgaaggccaagatagctgagtatcttatcctttttgtaacttcttgattattttacttattggcaaaattcattaactgtcagccaataatttaatattatgggaggaaaaaattttgcccagatatctgaggcaatactcccaaacactaacaaactgatgcctaacaaacttgacattttgaacacttaaagttttccctaaactttttaataagcacattaataaagtatgcttttaaatatatatgtacaataatt

SEQ ID NO: 2095 - DNA, 585 bp, Homo sapiens; identical to SEQ ID NO: 2094

SEQ ID NO: 2096 - DNA, 585 bp, Homo sapiens; identical to SEQ ID NO: 2094

SEQ ID NO: 2097 - DNA, 603 bp, Homo sapiens
cagatggagaaattagcatacaaagaaactgacttgtcagaagtcagagcaaggtattggtggatccagggataaatcccaaacttcttaacccctagaccggtttttagtccattgactatgcagcctaatggtaagtatctttttaccctatcgtggaggtaagagggattaagagacctagcaaggactggctttaaggaattcctcacgaataattagactactcgttatccttttctttatagccatgatgtcatttttgtcattggcatgaattttccagattgggagaggaggtctgaagttttgctttttaaatacttaaaaatatttctcggtggctcatgcctgtaattccaacactctgggaagccaaggtgggcggatcacctgaagtcaggagttcgagaccaacatggagaaaccccatttctactaaaaatacaaaactggtgggcatggtggcgcatgcctgtaatcccagctacttgggaggctgagacaggagaattgcttgaacccgggaggcggaggttgctgtaagccgagatctcaccattgcactccagcctgggcaacaagagcaaaactccatctcaa

SEQ ID NO: 2098 - DNA, 603 bp, Homo sapiens; identical to SEQ ID NO: 2097

SEQ ID NO: 2099 - DNA, 2687 bp, Homo sapiens
tgtgagccaccatgcccagcatttttttaaaattattattattattttattttatttttttagatggagtctcactctgttgcccaggctggagtgtgcattggtgcaatctcagctcactgcaacctccacctcccaggttcaagcgatactcctgcctcggctttgcaagtagccaggactacaggcatgtgccaccacgcccagctaatttttgtctttttagtacagatggggttttgttatgttggccaggctggtctcgggctcctgacctcaggtgatccacctgccttggccgcctcccaaagtgctgggattacaggcaggagccaccacacccagcctcaattatttttttaatgcctcctgtgtgccagtcactgtcctgatgtcattttggacattcaaagctgtgttagattggacccctccctgtcttcagattttatagtccaattgaggcaactagaaataacacacattacaaggtagatgacagaagacatagtcacaattcaactagcacatacttacttgactgagtaactgttttatgtgaggtaataggagccaagtgtctccttgatgcagccgaagatctctaggtcgaggaaccggtgccatgaggttgtcctccactcttcctgaccactgccatggtggcaaacctcagggtctgctacttatctcctccctcattctgaggaatgtcataggaaggtgtctgtcacctctggctcagtgggtagggaaggataaatgttctttgaagtgagaaagaacttcagtctgtccggttgtcaatttggagcaagtaagttttggccttattgtttgtttcttccagagagctctctctgaggatgtgtgacattggagttattcattcattggtcaccaaatgcttgggaggtcagatggtggctcccagattgaattcagaaatagacctaagtcaacactttagcagcaagttggttcaaggggaagcaagccgctattggtcacttgactccttgccatcccttgtggcttgaatgcaggctggaaaggtgaggtgtgtccggagccagaactctggaggctctcagtcttcttcctgaattttagggttccccacagagaccatttccaagctatacgggaagaaagaggaaaccccagggttctttggcaacaagcttgctttttttctggttcttggtatgctccaccagcagcagcatcacctgggagcttgttagaaactgaattctcagctgggcaacatagtgggatcccgtctctacaaaaaagtttaaaaattagccaggcatggtggcacgcgactgtggtcccagctacttgggaggctgaggcagaaggatcgcttgagcccaggagatagaggctgcagtgagcagtgatcatgcactccagcttgagtgacagagtaagactgtctcaaaagcaaacaaacaaaaagaaatctaaattctcaggccccactccaaacctactgaatctctgggatccagctatctgtgtctgaacaagccttgcaggtgactctggtggacatgaaggattgagagccactgatccaatcattttgaattaaactgaggcccaggagcattaaggaatgacatcttggttacatttcaccaagtcttcgtgctgtgatttttctctccttgctagagctttatatttttaccttacttctaaggccacgagatcatttcttgccctcattattagtttttcctaaaattaatgattggacttaaccttccagagataatacttttcatatcacagctctttttatggcatcttgttttctgctttggtctgacctatgttcttcatcttctacctccgatttcatccttaaagctttcccatgaatttcttaaaggggagaggggaagggccctaatatattttattcttcagttcagaagtggttcaggaaattatattttaagtgcaaggtgcccctagcatctttgccacagttgaatgttttcttaagtctgtcactaaaaggtgggcttctgtgcccaattcttggcacttctgtggttcattagaaaaacactaagtttgcaggccaggcttggtggctcatgcatgtaatcccagcactttgggaggccgaggcgggcggatcacaaggtcaggagtttgagaccagcctgaccaacctggtgaaacctcgtctatactaaaaacacaaaaattagctgggcgtgttggcacgtgcctatagtcccagctactcaggaggctgaggcaggagaattgcttgaacccaggagatggaggttgcagtgagccgagatcacgccactgcactccagtctgggtgacagagcgagactccatctcaaaaaaaaaagaaaagaaaagtaaaaagaaaacatttttgtagagacaggatcttgctgtgttgttcaagctggtttcgaactcctaacctcaggcaatcatcctactttggccccccaaagtgctggaattataggtgggagccactgtgcccagcagatttcagcttctccaatctctcccttgacttcctggcaggagagctagataaactcaggtagacatgtctttcatggctacccaaagactctgtacagctagccctcaggagcctgtttaagtcaagatgtccttgcagtcccacactg

SEQ ID NO: 2100 - DNA, 2687 bp, Homo sapiens; identical to SEQ ID NO: 2099

SEQ ID NO: 2101 - DNA, 161 bp, Homo sapiens
tgtgagccaccatgcccagcatttttttaaaattattattattattttattttatttttttagatggagtctcactctgttgcccaggctggagtgtgcattggtgcaatctcagctcactgcaacctccacctcccaggttcaagcgatactcctgcctc

SEQ ID NO: 2102 - DNA, 84 bp, Homo sapiens
ctcactgcaaccttcgcctcccaggttcaagtgattctcctgcctcagcctcccaagtagctgggattacaggtgcctgccacc

SEQ ID NO: 2103 - DNA, 881 bp, Homo sapiens
gaaatcccatctctacccaaaatacaaaaaattagctgggcacagtggcgtgcacctgtggtcccagctacttgggaggctgaggtgggaggttagcttgagcccaggaagcggaggttgcaatgagccaagattataccactgggtaacaaagcgagtccccatctaaaaaaacaaaaacagactatttttcagattcaagaagagaggtctttccctctttcctcacctcttgaggcatgaaacaggaattccttatcctagttttatcaccaccaaactcctagcagtcataaaagtcctttttcctctaaacccacctcctctctgcctcacactgcagtatccactctgtcgccagcagcgaggcattatagcaggaggcttctgaattggccagaacagcagctctcaggtggggtgtctgagaacctcatttcctcattacatccctccctggtcagccatatgtgttcagcagccaaatggcaaaattcacccccagaactgtgattgtcttccctaatctggaaggcccacaagtgtggagaagcactggagaccctccagaagcagtagtgctagcagtcaggggctactctccctgccgggccccgtgcaagggcctggccaccctatcccaggtatgtgacacttggctggctgttctttattgtcctgctagtacctgttgtaaagcttcttttattaaagaagagcaggagattgaagtgtcataaattgaagagattcacaccaacacggcacatgtatacatatgtaacaaacctgcacgttgtgcacatgtaccctagaacttaaagtataataacaaaatatgtattaaaaaaataaataaataaattgaagagattgaatga

SEQ ID NO: 2104 - DNA, 881 bp, Homo sapiens
gaaatcccatctctaccaaaaatacaaaaaattagctgggcacagtggcgtgcacctgtggtcccagctacttgggaggctgaggtgggaggttagcttgagcccaggaagcggaggttgcaatgagccaagattataccactgggtaacaaagcgagtccccatctaaaaaaacaaaaacagactatttttcagattcaagaagagaggtctttccctctttcctcacctcttgaggcatgaaacaggaattccttatcctagttttatcaccaccaaactcctagcagtcataaaagtcctttttcctctaaacccacctcctctctgcctcacactgcagtatccactctgtcgccagcagcgaggcattatagcaggaggcttctgaattggccagaacagcagctctcaggtggggtgtctgagaacctcatttcctcattacatccctccctggtcagccatatgtgttcagcagccaaatggcaaaattcacccccagaactgtgattgtcttccctaatctggaaggcccacaagtgtggagaagcactggagaccctccagaagcagtagtgctagcagtcaggggctactctccctgccgggccccgtgcaagggcctggccaccctatcccaggtatgtgacacttggctggctgttctttattgtcctgctagtacctgttgtaaagcttcttttattaaagaagagcaggagattgaagtgtcataaattgaagagattcacaccaacacggcacatgtatacatatgtaacaaacctgcacgttgtgcacatgtaccctagaacttaaagtataataacaaaatatgtattaaaaaaataaataaataaattgaagagattgaatga

SEQ ID NO: 2105 - DNA, 84 bp, Homo sapiens; identical to SEQ ID NO: 2102

SEQ ID NO: 2106 - DNA, 435 bp, Homo sapiens
ctgcctcagcctcctgaatagctaggactacaggtgcgccaccatgtctagctaatttttgtatttttagtagagacggggtttcaccatattggctgggctgttctcaaactcctgacctcaggtgatccgcccaccttggcctcccaaagtgctgggattacaagcgtgagccaccgcgcccagccaagttggttattgtatatattttgcattaaactgaacttcgatgaccaccagataatacaaatgttaatgaactaaacggaaatattgtgccataggaaaatgggttagatttatcagaaaatctgttgagcagtagagaagtgggtaagaaaacaaggtctcgttgcatgttgcaagggatataaaaccctaacccatttaaaaagatgaatgtcagcctgggcaacttagtgagaccttgtctgt

SEQ ID NO: 2107 - DNA, 238 bp, Homo sapiens
tttttttttgagatggagtcttgcactttcacccaggctggagtgcagtggcgtgatctcggctcactgcaccctccgcctcctgagttcaagcaattctcctgcctcagcctcccgagtagctgggattacaggcgcctgccaccacacccggctaatttttgtatttttagtagagacggggtttcaccatgttggccaggctggtctcgaactcctgacctcaggtgatctgccc

SEQ ID NO: 2108 - DNA, 130 bp, Homo sapiens
ctgcctcagcctcccaagtagctgggattacaggcgcctgccaccacaccgggctaatttttgtatttttagtagagacagggtttcaccatgttggccaggctggtcttgaactcctgacctcgtgatc

SEQ ID NO: 2109 - DNA, 15500 bp, Homo sapiens
caaacctccggaggccggggacggaaggcgggcccgcagcagatcctggatccggaatctcccgggcaggagcggaatctgtcccgaaccgggtctgtgaggaactcgcgaacttggattaggaaatcccggagcccggatcgacaaatcccggaacccggaattaagatcgccaagtcccggatcgcggagcacagagcacggagtggactcgacgcggagcccggagtccggatcgcggcaccgcgggacgggacggagcgatgtcgggccgaggcgcgggcgggttcccgctgcccccgctaagccctggcggcggcgccgtggctgcggccctgggagcgccgcctccccccgcgggacccggcatgctgcccggaccggcgctccggggaccgggtccggcaggaggcgtggggggccccggggccgccgccttccgccccatgggccccgcgggccccgcggcgcagtaccaggtgagcaaggaggacgcgagcggacgggggcgagaggcgctgcgagggcgcccgggccggcggctgaaggggcctcgagtgagggccctggggaatgcatgaggaactccgggagacggtggagggcgggccgggaccctcgggctgcggcgggtcgcggtggagaagtgggaaggggaagcaggttctgcagcggagggctggaagcagctgggaggcctgggggcttccgcggcacagggattccgagtgactgggagatggaggagtttggggagccagtgaattgtggcgggtgggttgagaagtctagggtaggagggctggaaagtgatgagaaagtttgggaaagggccctcgctgagaaaccggggttaccctgcatcggccttggtcccagtccaagtctgccctgttttttctgattgggaactggcggagctctagcgtgtctgagatggctcccggctgctaataaggaggaaggagcctggcttcccacgggcacgggacgctgaggctagggccaggggattccagcttgtgcacgggcggactttactcctgaggcagggccaggcgccttcgctgggaggactccagcttagaccagagacggtggtggcctggcctgaggggaggcccagcccagtcacaggccggctctcttctgggctttctgcctcctgtcatcgtgtccgggagttgattagtctggacgtgcagagtggagccctgctggtctggggccggaggagtctgcgagagttgcttcaaagagtgctgtcctgacccctttggggttttgagagctgctcagattgcagcttcaaaagcccttgcaaagcagcgacttctgctcagtgtgtgaggacctcagcctgaccctgccagtgctctagtctgctgttcaggttgccccagagggcttggaaactgtgcccatctgccttgtcaccctctctgcatttttatttggccttcaggttctaactccaccacgtccgaagccatgtgcccaagcatttgacactggcttcttgctcatctacgggtttgctgtgggcttcctctgttttcgactcatgtctccaggcagaggtccttagggatcctcgtggagtatacacagcctacctgccccactgggccctcacttctaaggagatggcttaactagggacagtgactggatttttttttccttcttactcctcattcttcctcctttctcaagagaaaagagagtctgggtatgggcagagacagacctggtcccagggattccagctggggctcatctctcccaccttgctgtccccgttggggattcatgggcccagggtgttgctgagggctccctgcatcattcattgtagcccttgggcctgcccactgagacctggcctgggcaccatctgtgggcctttggccttggaaggacctggaacagacaagccgctccagtttccttggcatgcaagccataggaaatgtgcccttgggacagcccctgagaggatggattccacatgttttggtggggggtggccttgggcctgtggcaaggccaagctggctggctggttaggcctgggctgctagctgtgcggaagtaggagatggccctgagtctgggtttcccatcccactagctttcctcctcctggcaggagaggtagatgggaaggagaacccagccagctaactttggctgagtttgaagaggatcctatttgccttctttccaagtccagttgtatgactgccaggagaagggacttgagatctgggaaacaaaggggttcctgtctgttagggctcatgagatgcacttgaaaagtgagaatttgaggcccaagctgagcaaatagttgaaagaagggaagtgatgacctcccttcctccagagggtggttctagctgtggatcacagttaacagaggaacctaaaaaaagaaaaagaaaagaaaaaaacctccagggcaggatatggtgggctcacacctgtaatcctagcactttgggaggcccagacagaaggattacttgagaccaggagttcaagaccagcctaagcaacatagtgagaccatcatctcttaaaaaaaaaaaaaaaaatttagccaagcatggtggtgtgcgcttatggtcccagctactcaggatgctgtggcaggaggattgcttgagtccaggagttcaaggctgcattgagctatgatcctgccactgcactccagcctgggcaacaaaataacaaaaacctcagattgctgggttcactccagagagttcaaaaagttcaaaaaaaaaattttttttttctgatacggagtctcactctgtcgcccaggctggagtgcagtgacatgatctcagctcactgcaacctccgcctcccaggttcaaacaatcctctgcctcaagcctcctgagtagctgggattacaggcgcccaccaccacgcccggctaatttttttgtatttttagtagagacgaggtttcaccatcttggccaggatggtctcgaactcctgaccttgtgatccacccgcctcggcctcccaaagtgctgggattataggcgtgagccactgcacccggcctcaaaatcctttttactcatgggagagtgggtggtatgttccccaactgaggccctcaggcccaggttccaggagcatcagggccacatttggggcagggcaaagcacgctcaccggagccctggattcctcatctggggttcaggggattgatccaggcctacctggtcctgctgcaggcagggagttagggaggctcagagtgctggactgcttttttttttttctttaactcctgagttgtttttttttgtttgttttgttttgttttgttttttgaagtgggaggagttgctagcgcctataagccctatggagcttggcaaggctcagctgggacttgaactataagcagccttcccctggggccctgagtgagccaggggctctgggcccaggaaacctggagcagatgtctgggtggagcctattccagaccctgcctatgaggccttgtcttgggacttcctgttaccggagcacctgcccaggagggatgggtggtgctgcaggttttgtgaacactgcagcagggagcttcctggggaccacagggccctcgctcacctctgcaggacccactgcttcagttcttccctgtctttgtctcaggcactaggaaaaactagtctgggatgtctgggcctgggcttacagctgtagccacacttagtttttttctataatctcaggccagagaaagaacaatctttaaggcagagaaagaggctgtcttttgcctttcaacagctctgattaatctcttcctgatgcagagagactttggcaggactcccaaagccccagagccccccactttgaactttttattctcccaaacacttccgtcccaccctgctcctcctctccccatcctcacgtctgtgggtcatgtttctttccatctccgcatctggtcaagaatctgaccctctgtgttgggaacatgggtttagtgcgggatgaagaggttggggaagaatctcatctccatgatgctggggtgggggagggtcctttgatttggtacaagtctccaccctgccgggcttggttggctggttgtgctcgttgcataatctgggccctggggccagccctgtgaagctgccagggacagtgtgtgcaaggcagagctgccaaacaggccttgcaggcagcagccatggggaggcgggtgggggtggaggtgactcccagatgggctccacagaaatgtcagggagcaaggcctcaggtgggaaatccttctgcaggcatctaaagaagctatttctgtctcccactttcctgctgctcagcctgggcctctatccttgcctcccaggataatcttagcccccttctccagcttgggattgccagggctacacggagccagagccagtcctggctgccaggtggtgcctggaccactggcagagtccaggtgctagctgctctctttcccacaggccacccaggagccatagcttcccttctggggtcttctgtcataggggtagtagttgggcagtagggaggtaagaggagggtccagttctgggctgtgggtgggggctatgtgataccagactacagggtacagggtccctgtaccctgcccgaggccacccccaccagctggtacacgttccaagccatcctgttgcagccctgctcacctggggtgctgctgcctaccagacccctttctccctcggccacagaggatggggattggggctctgcgccattggcctactcatactatagtacactcctctgcctggcagtgacactgcccctgtgcctctcagccatgcttcttcttcatgatgggagaaagagaaggagggcagggcttggcaggactgtctgagagaatagggaccagcttgcccagggaatagggcacagcatgctggggctggaaggtagcaatgggccctgaaaagctccccaaggcccttccctctgcaggcaggaccctcctcccagcccaggttctggcaggcctcattcgctggcatggctgccagggcggttgcagggggcagggcaggtgtggtttacactctgtgctcaggcgcccactcccctttgttcctggggctccagcagggctctggtgtgctgctcaggccctacctggctgacgagagggatggagggcatgggctatgggtcccggagggccttgcccctgacctatgcacccccgttggctcacttcccccagcgacctggcatgtcaccagggaaccggatgcccatggctggcttgcaggtgggaccccctgctggctccccatttggtgcagcagctccgcttcgacctggcatgccacccaccatgatggatccattccgaaaacgcctgcttgtgccccaggcgcagcctcccatgcctgcccagcgccgggggtaagagcatcctgcttctctcactctgcctaactcagctctggtggtagcagagggtttccttctatcttaagagctttggtgactgaggatgactccaggctctcctgggggagagggtcctggagactggaggggcgttatgggagtgagtgtccttttttggaccattgacctcttaagtgggtttctgtcctccccaggttaaagaggaggaagatggcagataaggttctacctcagcgagtaagtgttaagaggacacctgggaggcctgcccagtggccaccttggggtgggtgtccatctctctcaaagctgggctgcagcaggaagggaggaaagagccaggctttggctgaagcaagctgatgagcttctgctaccttccttcagatccgggagcttgttccagagtctcaggcgtacatggatctcttggcttttgagcggaagctggaccagaccattgctcgcaagcggatggagatccaggaggccatcaaaaagcctctgacagtatgtgtggccctgaccacctctagccttcccaggtttccttgccttccacccccttgttttccaggggccaagcaagttgggctagagccgggtttttcacatgcaggatgcagcccactagtagagtacgaactcagttgaatgtgttggggccagtatgttttaaatgaatatatgacagtagaaaatcttaaaatacttcacagtagtacttaccatagtagtaaatggattctttcatgacatttttgtttctgataaatagatatgcagaccttgggtcataattgaaaatgtaaatcttatgggtggtggtcaaaagtttgaaaaccactagactaggggataaaggtagttcctttctccttccccttccccatccatagagaaattttcttttttttttttttttttttttctgagatggagtctcgctctttcacctaagctggagtgcagtgttgcgatctcggctcactgcaaccttcgcatcccaggttcaagtaattcttcttgcctcagcctcccgagtaactaggattacagatgcctgtcaccacgcccggctaatttttgtatttttagtatcgccatgttacccaggctggtctcgaactcctgactgcctcggcctcccaaagtgctgagattacaggcgtgagccactgcacccagccgagaagcttttcttaataataatgtagaacagtcccgagtggtgaagcctttccaggggactaggatattttggagccgtgatgggtgtttgggtttcatgtaagatgtgagccagagactggctgcgtgttactccatcatgccgtagcaccagtcccactgtgctggcattgttggtgatgcatctctttccccataaaatggtgagttccggccaggtgcggtggctcacacctgtaatctcagcactttaggaggccgaagtgggcagatcacctgaggtcaggagtttgagaccagcatggccaacatgttgaaataccatctttacaaaaacacaaaaaattagctgggcatggtggtgcgcacctgtagtcccagctacatgggagactgaggcaagagaatcgcttgaacctgggagtcagaggttgcaagtgagctgagatcgcgccactgcactccagcctgggtgacagagtgagaccatgtctaaaaaaaaaaaaggctgggactgggacttactacttctgattcccagtacctgacaaggtgcctggctggctcatggtgctcagtactgattgttgaatggttcatatgagaagatgcggtagcactgtgtcccagcatcttggtccacctccagttgtgattgcctttctctctttagcaaaagcgaaagcttcggatctacatttccaatacgttcagtcccagcaaggcggaaggcgatagtgcaggaactgcagggacccctgggggaaccccagcaggggacaaggtggcttcctgggaactccgagtggaaggaaaactgctggatgatgtgagttggggagggaggttctggagggaaggaggcctgtgtgggtttaagactgagaccaaggagtttgatactagcctgagcagcagagccagaccccatctctacaaaaaatttaaaaattagctgggtgcggtggcatgcacctgtagtcccagctactcataaggctgatgcaggaggatggcttgagcccaggaggtcgagcttcagtgagttatgatcacaccactgcacttcagcctgggtgacagagtgagattgtgtctcagaaaaaaaaagactgggccagacacttgggcgctcccagagaagtcctgccatagggaggggggcgctgctccaagcccgttggaggttgatttgtgtggttattacagtgttcctgcagatggcagtcgagtgtctcgaggaagtccctcgtgggctgcaagagggcaccatttccctgcctccagtctgcccagagtcctgcttccatccttcagggcccaggaatcttcagtatccggagctccagggctgaaatggggcttctctttcttgggatttagcatagcttgagatttgagagctcagcagcaccatctcacacccctttccatccccagcctagcaaacagaagaggaagttttcttcattctttaagagcctcgtcattgagctggacaaggagctgtacgggcctgacaatcacctggtggaggtgagagtgggcctggggcaaaagcaggctgatgtgcaggtttggcagggaaatggcctcagggcccttgggaggccctgtgttcacgcccacccccttggtgataagccatgcttccctccctgccagtggcaccggatgcccaccacccaggagacagatggcttccaagtaaaacggcctggagacctcaacgtcaagtgcaccctcctgctcatgctggatcatcaggtgacagagaccctggggtcatttctgggcccacagggacccctcaggaggggagctggttcctagaaacccttcctgtccctgccctattttcccactgttctactataagaacccgttctgactcccctccatccaactccagcctccccagtacaaattggacccccgattggcaaggctgctgggagtgcacacgcagacgagggccgccatcatgcaggccctgtggctttacatcaagcacaaccagctgcaggatgggcacgagcgggagtacatcaactgcaaccgttacttccgccaggttagccagatgccagcccccgttttctcagcccttgctttgccttgcctgctgggctactccttggccacagcctgcagactgctgccctcactggtcctggaatggtccactccactgtgcccacaagccaacgctgagcctttcgtatttcctccagatcttcagttgtggccgactccgtttctccgagattcccatgaagctggcagggttgctgcagcatccagaccccattgtcatcaaccatgtcattaggtaaatgcaaggagggggacaggaaggctcttctaagagcagattcacccttggcttgaactaaagccaaagaaagcatcaggtttctttttccctgagtgtgtgcagagaatgggccccagatttggcccaggtgggcaggatgaagtcagctatgtgccttccctccccatgtgctgcctgcagtgtcgaccctaacgaccagaagaagacagcctgttacgacatcgatgtggaggtggacgacccactgaaggcccaaatgagcaattttctggcctctaccaccaatcagcaggagatcgcctcccttgatgtcaaggtgggccctctggctccacagcttcctctggggcccaggattggggtgggctggctctgtccagcatttccatacatgtagcacctggaggacgggatgggaactctggctcagttgcttgcatgtaagctttgggggcacagtctgacacaggtaccctctccagatccatgagaccattgagtccatcaaccagctgaagacccagagagatttcatgctcagttttagcaccgacccccaggacttcatccaggaatggctccgttcccagcgccgagacctcaaggtgtagtcctctttcccgaggggactcctatgtaaagctctgggtgatttttacccacagcagttcccagggtggattagcccaggggtggggattatgctatggctttcctcctggctctttgcagatcatcactgatgtgattggaaatcctgaggaggagagacgagctgctttctaccaccagccctgggcccaggaagcagtaggcaggcacatctttgccaaggtgaggctctgccctgttttccctcctttggccgtgagtagcaaaggcctgagccacttggtttctcccttctccaggtgcagcagcgaaggcaggaactggaacaggtgctgggaattcgcctgacctaactgctcagggatctttcttcccagccctggagcctggagggagaccaccctctgggtccttgctggggccgcagacacgtaggctggggtgaggagtgtctgctgtcaccctctactctccagctttagtcttataaatgtagtgataggattccttgttgcttggtccccaaagccttatactttttgcattggctttaattgggttcagcagatgcctcctctgcccccctgcaggcaggcccaagtaggactgctggaggctgtgctttgacattgtaagacatttccgaaccaaaggctgctgggtttgcatgtttacagactccccctggggcgagggtcagagctggctctggggagctgggctaggaagaggaggtgcagcccagactcttcctagcctttctaaaccaaagttctttgccattcctacaagcccagccttgctgctggttttttcctttcctttgggtatttgcactattttgggagcaagttttctatgtgggagccactttttttgtacaggggtaagttgggggttttcagggagcctgttaggtgcctccttcttttctttcctcaatctatgcaagcggctctggccgccatcatctcctgggatgccagagggctgcctctccagcggcttgggccggggaggggacactccagttctctagcatggcctgaggtatggggtatgtgcatgtggaggccagggtaaggtgaatggggaggctgggaggactggtgttgccctttggagcttggtgaggagggtgggcctagggcttggcgagtgccacatctggcaggtttggaaatttccaaataaatccttttgtctattggtggtgcctggacctggtccttgaacagcacagccctcattaacagactggagtcctagaggacttggcccacagagctttattggagagatacacacaaaggctgtccactcacttccataatttcttgatggacatgtttttctcactgtccttctgcatgacctaggggtgggagagagaatgaacattaagttacgaacacacacatgccctagcccactgccccagagccaccactggcaaaggcacaaagatggaggcctataccttggctactgccatctcaaagtcctcctgagtgacatggactcgccgttctcgcagggcatacatgccagcttctgtgcacacgccctgaacaggaaaaggaaattgaggccccactgctgtgcccctcatctgtggcccttgagcccagagcttcctgcctctgccctgttttcagtgggtactccaattaccttcacttcagcccctgatgctcctggcatgagctcagcaatttttctcaggttgatcccccgggtcaggttcatcttccgagaatgaatcttcaaaatgtccagccgggcctggagatggcaaggaaaagcctgagccccacaccccacccccacagccagagccactttgcacagtgtccatcacaaacctcctcattggggggtgggaattcaatttttctgtcaatgcgccctgggcgaagcagtgccgagtccaggatatcaatcctattagtagccatgataacctgagcagagaaagcaagtggggatcagctaaacctcttcctcagcctgcgtggcacccaggccttccctgggcccatcccaaggatgctaccaccttaccttgatgttcttggtggcctcaaagccgtcgagctggttgagcaactccagcatcgtgcgctgcacttcactgtcccctccagaacccccctccagccgcgaggagccgatggagtcgatttcgtccatgaagatgatagatggagcatgttcccgtgccatgacaaacagctccctcaccattcttgcccctgtgtggaggccgagctggtgttagggagcttattagcttattagctctctaaccccctacccctacctcttgcttctcacattgctagccatggttaccttcccctatgaatttctgtaccagttcagagccagagacacgaataaaggtacagtccgtatgatgagccacagcccgggccaacagtgtcttcccagtgcctggaggtccatacagcagcactccctacaggggaacagcaggactcagggcagaaagctacacccctcatttcattcagtgaacatttaccgagtgctgggtcccttgctagatgttagggatacaaaaaaaaaaaaggaacatcaaggtcccttctatccaaaccacctcaccgccctaggaacacttccccagccactcttttcagggggagggccagcccaagcaagatgcagcctatcccggtgcctccccaacccctgcagtagggctggctggggcaggaggagtaagtacagcttggccctctcagagaagccctgctcctcaccttgggctgagcaatgcccagtgcttcgaagagctcaggatgcttaacaggcagctcgatcacttctttgatctccttgatctgtttgtccagtccaccaatcatctcataagttgaatctggtactttctccaccatcatcagtgacactaatgggtctaccttgttgggcaggatcttgtgcagagtgtagctgtcattccttagagccacccggcaattgggtgtcacctgggtgaagggggcgagtttcagaagtggtacagtaagagctgaccccaccaccaccaccacctcacctgctacactcacatcattgatgtcaatgtttttgtccacgtctacaacaaatttaccttcaggatgtacctaaagaaacaagggctcatgaccttccttgacagccaccaaatcactaatcctacccaggaagacctatgagaatcccacaataccttgacagaacacagaaccctgtctcccgaggctacacacaaaggggtgggaatgcagtggagaccgagctggtccctggggtcatgctgcttttaccttgaccaacactttcttcttatccatggcccggactacttcccccacataggagccctgctcctgcagcagctgtagctcctcccgcaataggcgaactagatggcaaacagacacagtggtcacctagctactcctttggagtctccaggacccaattctacgtgcatgagctaagcatcactcttattaaaggaaggccaaaggtcaaaattcatgtatttaaggaggctacaatagggctcaggaaaaagagatgcatgtgaaactactagatgatgacagggagaaaacagtaagcactgctgtgaagacacagtgcagggagataaggacagacctcagacaaactgcccacatgcggcttcccatctttctccactcacctttagcatttagttcgttcctctgtgcctgcagcctccggaggttttggctcttatcattcacaatcagctgtggcagacaagagacaaattccattattcaagggcaggagacaggaggaggtaggatcttggccaagacctcacaggtctgaatgagctgagggaagggcacagggcacctgcatgttgtttcagattctccagtatgatcctaatgaccctgccctgtccttcaagagtccctctggaccttacagcagccatcaaagaaggctgcttgtccaatactggtccaggagtaacagaatctaatggagaaaagttacagctggctcatgtaacaccaaatttcttgcaggaaggcaacaacacctggtggaaagattgttaggtgagaaacctgagttctagcccagccgctgtcaatcaaaagcaaagtaaaggtaagacaatctatttttaaaaatctagatctgttaccaaacggcacatgggtatagcatcagctaccctgcttcaagactactaaggtgaacgaataaaaacacatgaaaaagcattcaaaaatggtaaactaaacataatacctgcaaatgcacttggaattcagaattgtcttttgtggctttcccccatccaatttatattacagttgacacttgaacaacgcagggggttagggtgaaattgaaaatccatggacctgtccaaagttaaactactaacagcctaccgtaacagtataacgtaacactaacagactactgtttatgttgtctgtaaggcttactactggaagccataccttactgctggaagccttactggtaacacaaacatttgattaacaacataaacggtcctttttctatggtttagcgctttaggctagggctctgggttgcccaatttctttcattcagtctctatggaattagcattgtccagatccctcaatgatgcccttcctcacattctcacttcaccctcacccaacctcttggtgataaatttcaactcctgagcttatgtttcccttttataagaatccttttcattcgggcttcttccaaaagggttgacctttggctagaggtacctttactattaagatttgactcgaagatgtgtaacaaactgtgaacactaagaccctcaaagagatgggactggaggagaacaagagattgcttacttctgatacatacaccctactagctaagaaacaaacaagaaaggagaagcagcagcttcttccactgcactcccaaaggaattagatggatttgtggaagtccgtttccatcccccatcatcacccttcctagctccctctggagtccgtcctcacctggagttcttcaatcttggacagataatattggcggagtccgctgcctgccttcccctcctccagctccatctgaagacacagagtgagtcttaaacgacaggttaaacatccgagggggtaaagccacttgcagggcactttgaataaggcttgacaccaggtagctttgcgtagtagaaaaagtttggacttcggaggctcaggatctgggttctaatccctccctcccttggaaccctccattttcccaggactaaaataaaagaatgggaacgccgcctacctcatacgacttttaggaggaccgagaggcgatatgatatagacggggggcgctttgcactgcgtgaagtgctctacaagcccgaggtgtcagtactgacgaaggagccagcggaacggagccaaaggactggcgtcccgtctcctgcgacccgtgggccggccattcccgcgcccatcgcttccctcactcactccgcttctaccgcgtcttcctctcccagccttgccctgactcaccgagggcggcgctgacacagcagatccggtcgcaggcagcgtccagcatggactggtccaggcacctccgacccacccgacgctcctgccccggcccgctctccactcagatcacgctcgctccgcacccagccccgtaacctgccgggccgccactgcacccgccatacctgctctggtccgtcaagcgccatcttctctcttcagcagagaccgccggcatccgagccgtcttggcgcgcaagcgc

SEQ ID NO: 2110 - DNA, 22008 bp, Homo sapiens
gcggttccaagtgtggagaaagcggctctgggtctaggtagtgtgcggagaggggcgcggggtggaattgctgcgggaagtgggaaactggaagtgggaaactggaagtggaatctggtgctccggaaagagacgttcccaacttctactttctccccagattgagggatactccccctttccaccatgggcaagaagggcaaagttggcaagagccgacgagacaagttttatcacttggcgaaggagacgggtgagtccggattcgctcagtctgcgagcgagcgagcgatctctgcccggttcgcctgctctttgcgaccattatgtacctctcctgcagaaggggtggtcggttgcgaggccggagaaatcctactagtgaagcagtttgcgcacttggttgttttgtccaggttaccgttcccgatctgctttcaagctgatccagctcaatcgccgctttcagttcctgcagaaagcccgagccttgctggacctgtgtgctgcgccagggggatggttcgtaacactcgccacaggttgctcctggtggccgctttctgggttctgagctgggatggcttccagtttcactgcgggaggggaacccgaatcccggtcctcttgggggccgtttcctttcttgattgcagagaaagggcttggaatacgtgcctatgatatgctttggccagtacacgtaacaccagggatgagagatcagttgccaagagggggaaaaggatggctctaggtttttaaatttctgttccttttataggctgcaggtagctgccaagtttatgcctgtatccagccttattgtgggtgagtaacggacagctctccttggtgttttaaggggtgggtgtataaggtattttgtcctgtatttctctcctccctgcttgaagcaaccttttagaatactctgacctgatttcttccaggagtggacctggttccaatcaagcctctccccaatgtggtgactctccagcaggacatcacaacagaacgttgtaggcaggtaataggagtctctctcttccttccccctttatacggaaacatctacatccctgaaatcctctaaaggcaagtttttcctttttaccgtgctttgagcacgttcttgcctgacatctgtacgacaagacctatggcattcgtagtgtccactccaggctttatttagagtcagggataaaggtgtttggaattgggagaagggcagagatctttagtgaagtcttctcctgtgaattcagtgtcagactgtaatctccatgaaggtagagacatactgtttttgtttactattgtatctcctgtgcctggtactgcatttggcccatgatgggcactcagcaaatgactagatggacaaatggctgaaccagggccattccagtgtttctgtttccatagttccttttcttctctttaggccctgaggaaggagctgaagacctggaaggttgatgttgtgctcaatgatggggcccccaacgttggggctagctgggtccatgatgcttactcacaaggtacagggagtgtggtgcttggagatcaggtgatggtggaggtgggcgcatgccctcctgggctgcagagtgcgtcaactaattgtctctatcctacagcccatttgacactgatggctctacgtttggcttgtgactttttggcccgtggtggcagcttcatcacaaaggttttccgttctcgtgactatcagcctctgctatggatctttcagcagctgttccgccgtgtccaggccaccaagccccaagcctctcgccatgaatctgcagagatctttgtagtctgccaaggtgggcatcatttcctttctcttgatccaggctcccaactcccaaagcacactttttaatatatcctgtcatttttaggattcctggcccctgacaaggttgacagtaaattctttgaccccaaatttgcctttaaggaggttgaagttcaggctaagaccgttactgaattggttactaagaagaagccaaaggtgtgttttggggaatggggtcactcttgggtcctggaactctagggaggttgggcctggtgggtcctacaggtaccttagaagggcctgaccaagcttctctcttttccttcctaaggctgaaggctatgctgagggtgacctcactctctatcaccgtacctcagtcactgacttcctccgagctgccaaccctgttgacttcctctccaaggccagcgaagtgagtctccagccttgagggacatgaggtagccccagaaacatggcctgaggatctcccctgacacctttccatcctcccaaacagatcatggtagatgatgaagagttggcacagcatccagctaccactgaggacatacgggtgtgctgtcaggacatcagagtgttggggcgcaaggagctcaggtatggagtggggtaggcacgggggccaggagccctggaggcagggaaaggccatgatgttggacctctgggaagaggatattgctgtgctaaaggtttgggatgggggcctgagccttttgatttatgtagccgaagcccgaaaggtgggtagtgagcctaaaacagaagggggcggggacaaagagggagatggcaagatcagtaatagtatctctggggcaggtcgctactaaactggagaacaaaacttcggcgatatgtggccaagaagctgaaagaacaagcaaaggcactggacatcaggtgaggagagaacgcagcgaggcaggtgtggactgggtgtccaggggaaaagtctgggaaaataacccaactcttgggactgttttgccagcctcagctctggagaggaagatgaaggtgatgaggaggactcaacagctggaaccacaaagcagccctctaaggaggaggaggaagaggaggaggaggaacaactgaaccagaccttggcagaaatgaaggcccaggaggtggcggaattgaagaggtgaaaggagctggggtagagcttggagttccccaacgcagggactgtgtgaagatgggagaagaaaatgcaaggcatggatagaaactttggagctgggccggttttactccctcaatccaccccctcaggaagaaaaagaagctgttgcgtgagcagagaaagcagcgggagcgtgtggagctgaagatggatctgcctggggtttccattgcagacgagggggagactggcatgttctccttgagcaccatccggggtcaccaggtgaggcggcattgggggtgcaggtttaggagacagaaggatctgtttgggtgtttggaggtggggggtgttgaatgtctttttaggttgccgaacgataggctgtggttgctgtcttcaccacagggtgccttggtgagtataaggccacaaagaaacataaaccaaaaaggatgagttaggtagatagatgagtgtgatagatttattttttttttttttgagacggagtcttgctctgttgcccaggctggagtgcagtggcacgatctcggcccactgcaagctccaccttccaggttcacaccattctcctgcctcagcctcccgagtagctgggacaacaggcgcctaccaccacgcctggctaattttttgtatttttagtagagacggggtttcaccgtgttagccaggatggtctcgacctcctgacctcgtgatctgcccacctcggcctcccaaagtgctgggattacaggcgtgagccaccgcgcccggctgatagatttattcttgaagaactagaacatcagaaaagaacttaggttatagtagatgctgccaggttacttgagtttcaagcacagatgaatagaggatctccctcagaggggagcagcattctttagttcattgagaccaagtgagcactcgcattagggtacttccactgaatactgaagaacatgtttttcctgacaaaatcagggtcacaaacaaaatgaacttttgtggcttatgtgtgggagtgtcataatcaggtcatctttgttgtacaggagggcagtagagcatggtggccctagagcagacacaggctcaggtttccttcccagctctaccacctggagctttgtgaagtgactgagctgactaccacttatccttgctgcctcagtttcctcatctgtaaaacaataatagaacctacctactagagtttttggtgaggaataaaaaaagataggtgtaatccctcatatgtgataaacactcaagaaatagtagttggagtttttcctttgagacaagatcttgttttgtcacccaggctggagttcagtggtgccatcatgactcactgcagcctcaaactcctggcatcaagcaatcctcctgcctcagcctcccaaaatgctgagattacaggtgtgagccaccatacccagcctagtatctttaccatgaggaaaataaaaggttctgacaattggtttaagtggaacagttttgttggatgtatgttggctgggccccttttattcagtggaaacaaactgtgtagacggtattctcaggagatgattgagatgctgtctgagaataatttttaaaggaaaaccagtgttgtagaatatgttaagatttggtgctatgtgggctgtaggtaccttccttaagacctatttgtgataccactgagacaagacagctgagtgggatagatcagtaacccagcctagaacgggatgttgtaaacaggccattcactaccctggatctgagctttcccatctgtgaaaggataatggatttgccagtgttctttctagtgttgctgagcatagactgaggtgagggacacagaaaaaaaaacagtatatttccttttaaatagtttacctttgtttctgttacacttcagttattagaggaagtaacacaaggggatatgagtgcagcagacacatttctgtccgatctgccaagggatgatatctatgtgtcagatgttgaggacgacggtgatgacacatctctggatagtgacctggatccagaggagctggcaggagtcaggggacatcagggtctaagggaccaaaagcggtaaggggcacgtgtgcaccaaagggaatgctgccactctgaggaagtgttagggtgggtactaccagagcctgagtagggcagcaagggctccaggcaatctgggtctctgagccccctactttcctttgggtctacagtatgcgacttactgaagtgcaagatgataaagaggaggaggaggaggagaatccactgctggtaccactggaggaaaaggcagtactgcaggaagaacaagccaacctgtggttctcaaaggtaaggagaggccgggggcaagactgcggggagatgagtcttccttgggagaagggcagctgatgttctcctatcacagggcagctttgctgggatcgaggacgatgccgatgaggccctggagatcagtcaggcccagctgttatttgagaaccggcggaagggacggcagcagcagcagaagcagcagctgccacagacacccccttcctgtttgaagactgagataatgtctcccctgtaccaagatgaagcccctaagggaacagaggcttcttcggggacagaagctgccactggccttgaaggggaagaaaaggatggcatctcagacagtgatagcagtactagcagtgaggaagaagagaggtgagtagttgcagctgagagaagggatggaaaggaagcggtggcttgaaccatttctctaaattgggggttcttaatcttggctgcacatggggagggttaaaaatactgtactgacgatcctgatttaactggtctggggtacagcctgcatggcaggatttttgcaaattccgtgggagtgcggtctgagtagtacagagtggtggaatcactcagagtcctcccctcttcacagctgggaacccctccgtggtaagaagcgaagccgtgggcctaagtcagatgatgacgggtttgagatagtgcctattgaggacccaggtgagagctctgtatgcagtggaatgagaaaagaccactggaagtctcagtattgggaattgagctttgacctttctccttccctctctagcgaaacatcggatactggaccccgaaggccttgctctaggtgctgttattgcctcttccaaaaaggccaagagagacctcatagataactccttcaaccggtaaaggggccataaactcatcaagagtgacccagggtctggtgggtaaatgggtaattttttgtttttgagatggagtctcgctctgttgcccaggctggagtgcaatggcacgatcttggctcactgcagcctgattctccttgaatcgcttgagtcagccttctgagtagctgggattacaggtgccaaccaccacgcccagctaatttttgtatttttagtagagatggggtttcaccatgttggccaggctggtcaaactcctgacctcaggtgatctgcccacctcagcctcccaaagtgcagggattacaggcgtgagccaccgtgcccagtctggtaatttctttagaaagcctggaatgttggatattagacagatgtcctttccactcaggtacacatttaatgaggatgagggggagcttccggagtggtttgtgcaagaggaaaagcagcaccggatacgacagttgcctgttggtaagaaggaggtggagcattaccggaaacgctggcgggaaatcaatgcacgtcccatcaagaaggtggctgaggctaaggctagaaagaaaaggagggtaagtgatggggcctccagagattgggtggggtgggggtggggggatggggaagaggtcacctgacaggttcctttgcagatgctgaagaggctggagcagaccaggaagaaggcagaagccgtggtgaacacagtggacatctcagaacgagagaaagtggcacagctgcgaaggtaatgggaggacaccacaaaggtacacagggctaaaagtgcagcagaaagcaagcctctaacctcttctcttcccccctgtagtctctacaagaaggctgggcttggcaaggagaaacgccatgtcacctacgttgtagccaaaaaaggtgtgggccgcaaagtgcgccggccagctggagtcagaggtcatttcaaggtggtggactcaaggatgaagaaggaccaaagagcacagcaacgtaaggaacaaaagaaaaaacacaaacggaagtaagcagagctgccaggctcccaggagagcatggggactaggaggaagggtgtggcatggctcagtctggcccccttgattaccggcctagcccctgctcacatcacagctgtctgaagaacagtgaggtggagtgcctagaactcccgtggtggtcctgagcagagaggaggatgtcctcctgcctgcctgaaggtctcccatgaaaacactgctgaactgtgttgacactcatgaccctttttttaaaccgttaaagggaagttcggtgttggagcgatactcaatgtagtcagtctacacctggacgtgtgggccacttaagccctccccacccccatcctattcctgaataaaaccaggataatggaagagttgtcttttctgacagttttaataagcacttccctatctgtccctacactgtgtgcggcactattcttaatatgtaccaattcatagacagaaatgacaaacgatccacaggtcccggtagtaaaacatttactagagagcaagcagaaaggaatgcacatcttaaagaaaccttcacaaagtcacaaaagtcaaagtttgtatatttcttttcctttttataaacgataaacaaaaatcatcaaaatcatttcagcaaaagacttttctatcattggggcaagttaaaaaaaatacaatgagatagaagacactttaaaagctgttgttgggtttcttgtttaattttaaatttagcaataccatctcaaacctggagcaatcctggaacagttaccaggatcaccttttcccttcaatccttgtggcttctgggaatcttcagagcctgggtctgaaaggtgtttcctacatgtctcagggctggatgcaaacctggctggggacctgagcatcaactcccatttagaatcagacatctcccttccctgcaaatgtctacaactaccaaattgctccccaacagttagctcaatggattgaatttgcagaagccaactcctaaaatggggactgcctggccatacaactaagaaaaagaagtcaatttatagatgcttataaggtgacaccttagtaaaaaatataagctacatacaatataaacctagagtgagttttgtgccctagaagaccctttatcccaagataacctcaacttacccacatgacaactcacctagagccaaaagaagcttcccagctctcactgcttccaaggaccaaaacagcttcccaagaaaacatccgaaaattccttctgatgaaggggtaatgtctccaagctccagctctccactaagggcagggggtccttacactttggaccccaacccagccctgagacacctagttaccaaaatctttctaaaaattaaggacaactgatttcacgctttagcacatcccctctaactgtcccatcgacttttcttgcgtttaggcggctctgggacagcaaagccgtcagctgtcttatctgtcttgctgtccaccttgtccatcttgctgctgtccactttgggttccatcttgggctccatcttgctctcacgattaaaagcttctttcctgctttccccattccgaccatcatttgcaccccggttctccccatgccggcctgcgcttcctccatgtctgttctccccgtgccgatggccatcagtatgacggctgctgctttctggatggcggtatccatctccatggcgaccaccatctccgtgacgtggactatcgctatgccgattgccagtctctccgtgactgtgacggctgctgccccggttctcagtatatctctctcttttcccgttgctgcccccagtcccttctcggctgttattccctgaagctgtgttgttgactccttgggctccggcagacgggtaggtcacaggggcaccactgatgttgccagtattgccaaagcctgggatgcccttggcggcactggtgacggggctgtcaggactgttatggccctgttgtgctgagttagttggaacagaattcaagctccctgcactagtccacccacttgccccagcagcagaacttccagccttctgattacttaaactggctgcaacaaagtgactcttgtactgtgactgaaagagaaagagacatcaggagtaggtaagatagcaagttcaagaaacttgaatatacaacttggcaaatgatgaggtttacagaaactctgtgctatcctggcactgtgagtttagtgtcctgatggccccacagtatggtcccttttgttcttgtgctataaaggaaaacttgtggatctctgtggagagatggacccccagtgttctgaaatgtacttttatagcctgattggctagaataaagcatctatgtatttagcacatttatctgcattcaaaaccaaaaagttctgaaaacttaaaaaaaattttcatactgcaatttaagtttgacagcaaaacctgccttgaactcattctatcgattcaccttagtgtgactatcagtaaattttgcttcagaagtgagttggaggtgggtgcctgggaggtgggcaacacttcaggctgttgggaagggagggaacacacaccctgctgcaggacaacaatcccaggccccaagtgtgactcaaagtagaccagcacaaggggttctctagatcaacttgcatttccaactaagctactgttaggtttatattcaaaatccaagcagcgtgaagaccctaaatctagcatcaagcctaggcgcccagctacaaccaggaaaactaagcccctctgtcactgcccaagagttactgctgaaagtgcttttaatgaaatgcttatttcagacctggaaagctgctttcattgccgttagtcgatctcccatagctcctgtggaaggcttgtaggcctcataattgctcattacattgttatttcctcgatcctaaaaaaataaacacatctatgagaatgaaaaaataagcaggaaagctcactgctatagactaggcctcattatgaaaacccttgaagtgggagctacaaaggaactggatacttttagaaagctgctactgctttgtgagaaaagacacagtgacaatcatttaaaaatgcttatgccctcaacccagaaattctatttctggaaattaaccctattaaacagaaatgcaatcagattatgcccaaagttgatcatgtatttacataaacacttccaattaattaagtaaaaattacgttaaagatgaaaaggccctgaatagcatattgtgtgactgctcaggccctgaatcaagaccatgaagggtctgaatttcggcttgaacacttgtcactgtaaccttaggtgcctcagcattgttatctgtactaacttccattcagttattttgaagattaactgagccaaaacatctgattgcttggaatggtcctggcacatataaagtgctcaataaatattacctattattatgcatcatcatcattattattataatgtgggaacagagtatgtaattacaaagatgccaagtttaatgctccagaaaagtatactggcagctttcttccctggcttggaatcaaggtgacagaaaacaggcagttaagaaaggccaccaaaagggtacatttgttacctggtttgtgagaaaaactagctcccgacttggaaattcctgatccgttcctgagtttaatgacaagatatggctagactttacagtgaccctttggcaacatttacctagcagcaggctttaggccagtgttgaagggcttataaaaccagactgctgggccccaactccagagtttctgattcacaaggtctggggttggggatgagtttgcatgtgctgctggtccagggaccacagtgtgagatcactgctaatctagaataatttcctgagcaagcctagtcaaccaagtacacaaagatgcttcttcaatagaaagttaccataagaatgagcactgcattgactcaaatcagattaaatacaaattcccttctagacagggctttaaactcactgaggctttcctgggtagatgagaatattcctaatgactttcaggacatgagaccaactataaaggcactactgtagtagtctagactcaccatgttctcagagcccaggccaggccgctccctgtagcctaggcctcctccaccaatgttcagcttttttcctttccctcctttgaatcgagatttccgaaaccaggcattctgcattgaacaaaattcaaggttaagtcaagggagggagaaaagaacagaagaagagaacgaggacaaagaggaaattaagtgggaagggggaacttttgcttaattttcagccagcactacgctaagggaggaattttcacaggaaccacagattggtttctctttggtagcataatccaccaaatttgaaaagtggctgagatccttatctaaggcttcctacagtgctccctccctcaaggctctcctggaagggaagttgttcaggtaagcttcaaacccagaggagtaactttggctacttctaacttccttgaggaaaatgagcttatattttatttctcaaaccatgtattattggacgtaaacatttggaacttaaacaactggtatgttcagaagcaaaggaaaaatgctatgtgaagtgaggcttatcagaactgactatagggacagactcccagaaaggatggtagccacacaactgaaaattttatttacccgcagagcgtaaaagttttcattgaacttgaccattgccactcaacatatttactcacattctcttaagaatgcagggcggtggctcacgcctatgaatcccagcactctggaggccgaggtgggcggatcacttgaggccaggagtcaagaccagcctgaccaacatggtgaaaccccgtccctactaaaaatacaaaaattagccaggcatggtggcacatgcctctaatcccagctgcttgggaggctgaggcaggagaactgtttgaaccggagacgcagaggttgcagtgagctgagactgcgccactgcactccagcctgggtgatagagtgtgactccatctcagaaaaaagaaaaaaaaaaaaaaaaaaaaaaagcaaatgtctctgggaaggttaaagttttatctgacaatcacatattaccagcaaaataaagtgcttgagaggtagggcagcaggcttggacaaagtcctgagcacagaaagcctgaggtacaaaaagaaatggaagaaaatgccaaagtcaaaatgtgtcctgttttaaaagtttatttaggactagctctctgtgctcaggagcaggggaggaaacattattctcttctctcctgcagtgcaggtcctttactcctaggaccagaaacttgggcactgccacattgcagctgggttgtaccagttgtgtgagctggcctaggcatttgacaaactcttaacagtttctgctctcagaaagtgttccgaacccatttgtaatttggggacagcatggattcagatgactccaggtttgatttgttagaatgcctcacttagctttagattggagcacacctggaagagggcaatcagtgtggtcagaggtctgagatctctgcaaggaacagttaagaggcaccatacaggctgggcacggtggctcacgcctgtaatcctagcactttgggaggttgaggccgaggcgggcggatcacctgaggtcaggagttcgagaccagcccgaccaacatggcaaaaccccatctctactaaaattacaaaaattggccaggcgtggtggtgggcgcctgtaatcacaactgcttgggaggctaaggcaggagaattgcttgaacccaggaggcagaggttgcagtgagccgagatcgtgccattgcactgcagcctgggcgatagagtgagattctgtctcaaaaaaaaaaggtgggggggcactatactatacacatattgttttaaaggcatcacacatttttagcctcccagaagaaaaattttgtgggggaagagcagtaaggagaatagtaaccatctttgagattaaatttactcctaagtgtgctatggggtagaaattacagcgacagattttagcacaaaggaatagcttttcaaaacagatgctgttgaaagaagaagaccagataagactagatgaattttagtatctcacaattcctatctgtacctcataagccccacatcctcctagccacccaactttcttgtcaagtttttatgttatctgttccaggactgctaaaatgtcttggtcttataaccaggagcaattgaaagtgtgcccagcccctcacctgcattgccagatctaggagttccttagaaacgtgttgattggctccttccaagttccggaccaggtcaccagcaaaattgctgtccttgggagtgagtagggtataggccacacctttctcacccgctcttcctgtgcggccaatcctatgcgtgtgggtatcaatgtctcgtgccacatcatagttaatgacagtcttaattgaaggaatgtccagaccacgggctgaaataaaaagcaaccaaattcttttattcttcatctgtagtcagaagatcaaagtaaccagaaatgctagtgctaataagccacatttcctttatctaggcaaagcgcatgggtttggtgagctgagatacaggcatgttaagtcaccaccacagattctatgatgttaggccttctagtgtaagggacttttattttttagagacggagtcttgctctgttgccagacgggagtgcagtgccatgatctcggctcactgcaacctccgactccctggttcaagcaattctcctgcctcagctttccaagtagctgggattataggcacgcgccaccacacccagctaatttttgtatttttagtagagacggggtttcactatgttggccaggatggtctcgatctcctgacctcaggtgatccgcccgcctccacctcccaaaatgctgggattacaggtgtgagccaccgtgcccgactgggacttttatcttttgcatcagtaatctgccatgccctcttctcttgcactgggaatatatatttaaaatgtgtcatgaagctgagaagttctctcctttctaggaaaaaatatcagtgtttaagggtagttattaaaacttgacagaacaaatccagaaattatattccaaaaactgttctcatcctgagttaagttgcccaactaagctgtgtatagtagatcaatgtaagggtaaggtatctactatattcagacatacaataagggcattcactgccttttttcccagagtgacttctagctgcagggattctttgattagagagaaatactaagtgaaaagtggtatctagagctccagactgtgatccctgtgctgaactgctgcttccttgggggtttgggaggggatggccagccaggccaacagtctttccatcagcctgctcagatattataggtcttatgtagtaagacagagtacccttatagcctaggaacttaatgttgttgaaaaattcatactctacctgcaacatctgtggccaccaggactgggatgtcctttttcttaaagtctgaaatgaccttgtttctctcactctgatccatatccccatggagcagcccaagattatgaccctcctgtttaaggttattcgctagctcttcagcattggcttttttagtaacaaagaggaggacactccctgaagaggtaaattctaccagacgccgggtaagccagttccatttactaggtccagaatggagaatctccacaatctgtgtcacatcttcatttgcctgagaaggaagaaatgaaacagatgattgtgacattggagccacagggcacctgaacaaggactaggcattatatttctacctgcatcgagaagaccttgaacaatcccagttctccttgggccttcagcaagtcaagtgcagctcaaaactcacctctcctttccaatcaccttgctctccacctggtgtacatacctaatttgtatgccccactactttgtagagctttccttaacaataaccatggcaagcaactgaaggattctctaagcagccataactgaattccaagtcccaattcagagtaatttttcacatagcgcatatgtacaggtaagaaatgaaacctgattttttccaggccttccaggtcaccctttccctcctgcgtaggcccctaccacaataattaaaacgtcagttccaacctaatacgctgatgcttccaggcacatctttttgtctctttgaagcctttttaaaacaattgtaagttttgagacattcaataaaacaaaaaaaacacaaaatgaacaaaatcaactcatacccatcacctagcttcaatgattcccaacattttgccagtcttgttacgtctatccccacaacttgcaaaatacccaatctcaagcatgttgcatctataaacataacatcttttttttttatctcaatagtgagaaattaattctgtgttccataatatgagaaataaacccattaaggtcccatccagccctgcttagggttacctctccaatatctccctgcaccactcgaatagggtcgatcaggatgtctctggccaacttttcaatcttcttccgaaaagttgcactaaataagagagctaaaaggtaagataaattctgttagagaaacaatatgatatctttatgcatacccattaagcttctttggcattcaggattattcagtttttttacataagctcacctgaactttaaatttagtttagaaactgattcactagggaaagatttgctcttattctatttttattacatttttagttaagacaagttgtcagtatggttcagaaaaagactcttgatttcaaatcagcagatctgtactgtacactgcttctacccactgataaaactgtataatttagggcagtttatttaatttctgatccttggttttatcatctataaaaaggaacaagttatatctagtgctaagatcctgtccagctcagataaactcattacctcccttattatggttctcaccaacagacacaagatcatttttacttccataactctgagtgcttataaaataaataagtgccctttttagtacaaatttggtttaacaaaggtgcttcatacatactctgcctgtcaggacgaacatgacttgctatggatcgaacttggtactctgcaagaaacagaacaataaaattattataacctgaaatacagtttgggaagcctggaaaaagccatattagtaaaagtcttcataagaagttgtaagaattaagaaaattagaaaccccaggccaggcacagtggctcatgcctgtaatcctagcactttcggaggccgaagcaggcggatcacttgaggtcaggagttcgcagcctggtcaacacagctatctctactaaaaataccaaaaaaaaaaaaaaaaaaaaatagccaggctgtggggtaggtgcctatcaccccaactactcaggaggctgaggcagaagaatcgcttgaaactggaaggaggaagttgcagtgagatcgcaccgctgcactgcagcctgggcaacaaaagcaaaactctgtctcaagaaaaaagaagctcctaaacatatcattcagcataaaagtgaaaaattttccctccatccaactgggctaggtctagcagtgttccaatcagtaaagacagctacgaggataggaaagcaaagggcctcgaatgatctgacattcatctacccaagaacacagaccttaacctctatgatcaaaggcatatggataaaaatgaagacagagaaaatattccccttatatacaaaggcactttgaaatttcctcaacccaataaaacctaacatacttttccagagaaaactcctaaaaatgttcatcttagctatatttctatagtctaaccccatccaggagtatttttagcttctctcatgctgaaaaaacagtctagaaagacatggaaaaaaaactagtatcatgaggatggggacagaagaaactggtattcaaggcataccaaatcccatgtcaaacattcgatctgcttcatcaaacacaaggtaagagactctttgaagattggtagctttctttttcacatgatctatcagtcgaccctataagatcaacaaaatgaacagtaagtataattaaaggcattcacagggactttctaagcagttgcactcctggcaaaagtgctaattctctagtctcagactgtaatagatactggtccaacagccacataccttatgcactacttagctcaaaggaacagaaattttgaaaactcaatcggcatcttcatttacactgtgatttaaattctgtgggaaagtggccagaagcagtttttgaggcattctaaagtgacctgatttaaagcataatgacaggtttcaatgtttaaactacactcttctaggctattctgaccatatgtatctttctgattcttgatgaacttggcaatcattttgtgggagagtataagaaaaactatttgacatagaggggaatttgtagctactagcctatatgtcacagagactctcactgaactgctaatttagccaccaatcaaaattaaaaccacagcctgccgttcatcagtatattttcaaccctgcttttaccacactttaggggaaattctctgcaaaactaatcatgttttccataccgagggaggctgagaagccatttaaacacaaggcatacttactggggtacacacaacaatctctgccccctcctgaagggccttggcctgctcccacatactccctcctccatatacggccactgatcgaagattatatgcttttccaaaccgcttacattctgcatggatctacaaagttgtgaataatatattaacaaactgtgacactaacaaatacctgtcacaacccaaacgaagttctgaaaaacagaatgtgatgtcataaaaaatcgaaacctagaacatactttaaaaccacgattttattcataaaggtataaatgaatggaataccattattgcatctcaacagattatctaaaatcttttattcattttacccccttctcttcctgatcctgtcactgcttttctaccaagataaaatgaactcatcctacagaaaaactgtcagcttataatacaaacaatccccatatcacaataggcttttcctcttaaaaaaagtagttctggccgggcacagtggctcacacctgtaatcccagcactgtgggaggccaaggcaagcagatcacttgaggtcaggagtttgagaccagcctggccaacatggtgaaaccccgtctctactaaaaataaaaaaattagccaggtgtggtggcgtgtgcccgtgatcccagcctctcggctgaggcaggagaattgcttgaaactgggaggtggaggttgcagtgagctgagatcacaccactgcactccagcctgggcaaaagagtgagactctgtctcaaaaaaagcaaataaataaaaataaataaaaacagtagtttttaggggaaaatatgtatttggttatatagaaaatatttaacacataatactttccaaaagtttcctggtagcacaacactgtgaatatacttaatgccactgaactgtacattaaaaatggttaagataatcaattttgtgtgtatcttatcacaattaaaaaaaaaagtttcctggtcattctacctcacttgactggctggtcccttgctagtccacatatggaaggaggcattctatagaaagcacatacctgctggcaaagctccctggtaggacacacaatcactgcaattggtccatcacctggttccaactccttctggtccattatatgaatcaacatgggccaaatgaaggctgcagttttcccactacctgttttggcaataccaatcatgtctctaccacttaatgccacaggcacaccctggagaaaaagtaaaatataaccactctaaaatttcaattctaaagatgtactgaagcaaatcctggggaatgataaatgactactaacatttttatttgcaatggaacaaaacatacctggtgctatgcatactggttgtgaaatagaaatatcaatatccaacattctcattaacttcttgatttataggaaatgacatcattctcattacgtggatatcagccaccacttacagaacagaaacaactccattttgtttaaaatacagaaatgaaaaatcaaggccgggcagtggctcacgcctgtaatcccagcactttgggaggccgaggtgggcaggttccctgagctcaggagctcgagaccagcctgggcaacacggtgaaaccctatctcaactaaaatacaaaaaattagccaggtgtgctggcgtgcgcctgtaatcccacctacttgggaggccgaggcaggagaattgcttgaacctgggaggcagagattgcagtgagccaagatcgcgccactgcactccagcttggacaacagagtgagactctgtccccaaaaaaaacaaaaacaaaaacaaaacagaaaaattgcaatttataatgaagggttgctaaaattttaaaaattttccccccttaagaaggtacagactatctcattcatatacagaaaatgagaatgttctgcataagaataaataaatcccatatataaatgggaaaaagaagctaaaactttcagtaatgaatgagaattttcaagtgacgaacgaaggaattctagtcattgacagtgctaaatttgtctatatacgaacctttttggttaggtttaggcctaataaattattttcttcatatcatattttcaacatacgtatcagatacaaaagaatatttgtcagccatttagtgacttcttaagagtgataaatacctctatccttatcaacaaggttctacactaaacactgttttactgctgtgatttgtttttaaattaatatagtcatgaaagactaccctactttatttttctttcattatgttttacttacctggcactgtattggagtgggctgtgtgtattcagatttccgaatctggtgcataagttgttcgtcaaacccaaaatgagcaaagctacttcctggtctaggaggtgcagcaccagagacctagagatagagacaactccccagaatgacttgtacttcaacattaacagcatttgaagttcaacaatacttacctggatctagcattttagctggagtatgaagtaaaaatacaagtctgtaagccaaaatcatacaatgaaaaggaaaaacctcaaatggtaacaaatataaacctcatattaaaaactccatgataaatattcccaagataattgtcatacaattttaaatgattaaaaatttcttaactcaaaattaattttctcataacaaataaaacggaaaaaaaattgttcaatgaattgggaagccataactgttcttttgccattttgcattaagtattaaccagatggtagaaaaaaattaatgtatcttactcttgaaatgaaaattccaagtgggctccaaataagacaagtctacacatgctggctaccaagatataatctactgcctccattttcagttatgcttgatgaattaaagtctcacttagtgatggtccagccactgtcaagccctgttcaaactgcacctaggtgaagaatggggcttataatctccattttgtcccccaaagtggtaacctttcaatgcttctctggtgatgttgatatttccaatcaggatttcaggggttttacttaaaatttttcttgggtcactggggagatgagtaacctcttggaaaacagacaagtgtacacacacaaatacacacccctcctggaaaacaggagtttaaacatcgtgtagcaactgataaggtgcacacaggcgagaaagttgtctatattagagtagatagcatagcatattttttctgtgtgtttcatttaccatctatcagcaccttaaaccaatgtagccaatgtgcagcccaaaactttctggtaggcagtttaaaccattctgaaattagtacatgcatatttttaaaaggtattagtttattctaatttttaaaataaagcatactatatgtaatttgacagacaagtttatcttcatttcaaaatattctaagatatcatctgttaacatctattccttttgtttcctcttcctttagatggggactcccacccttcatcactagcccatccagcacagaacatataaaactgactgaaatatgaaacaagaaaatgatcctatcctaaaacagcatctagaagactaaaacaatcaaattaagagacatgaacagaagggatataataattactctggcaaagacagttcagagaccattagaaaagaaattcaaggttattagtttagataaccaataatactaaatctggactaattaacattaatattaagaatattgagcttaatgatgcttacccgaagattgagcttatgccggagatctattaactgctgtggagtgaggttggttatctcttcatgctcattgtaaaagtttttttcaaatggtg

SEQ ID NO: 2111 - DNA, 10894 bp, Homo sapiens
attcttggtaaattctaaacttcaacttctgttttaaggaaacacaaattcatccagtgttacaaattctgcagcaggtgttgaagatcttaacatcgttcaagtgactgttccaggtatggactaatgttacatttttccttttgtcttaattattttttgacatagggtggtctcttggacctgtcatttttcacttagttcaccctgatagctaagaaatgacattttgggaatataaaatattctgcaagttgctacacaacgagcatcttgctcacatcagacattattaatcggatattttgcttctcctggacaagcccgggcattacctggaaaatgcatctcagagcaggcagcatggagcaccagctatggttgaattggaattggccacagaggtgaaatgttttgttgctcatcattaacaatcttctggccgggcacggtggcttacgcctgtaatcccagcactttgggaggctaagacgggcagatcacgaggtcaggagatcgagaccatcctggataacacggtgaaaccctgtctctactaaaaatacaaaaaaaattagccgggtgtggtggcgagcacctgtagtcccagctactcgggaggctgaggctgaagaatggcgtgaacctgggaggcggagcttgcagtgaacggagatcactccactgcactccagcctgggcgacagagcgagactctgtctcaaaaaaataaataataataataataataatcttcttttctgaatatttgtatgtaaaatatatctggaaagatacaagagaatctaattacatagttcctccagggaaggaaactgaccgctgagatagggataggagagagacgtttgagatgtttctgtatattactcctcttgaatgttgagccatgtgattgctttagttattcaaaagtaaataaagttttaaagtgttgaaaaatatctaaaaaataaaaacaaaaaaaaaggaccaggcatggtggcatgtgcctgtaatctcagcactttgggaagctgaggcaggaggatcacttgagcccaggagtttgagaccagcctgcacagcacagtgagactctgtctctaaaaaacaaaaagaaaagaaaaacagaccgggtgcggtggctcacacctgtaatcccagcactttgggaggctgaggcaggtggatcacctgaggtcaggagttcgagaccagcctggccaacatggtgaaaccccatctttactaaaaatacaaaaatcagctgggtgtggtggtgggtgcctgtaatcccagctacttgggaggctgaggcaggagaattgcttgaacccaggaggggtgcagtgaattgcttgaacccaggagtttgcagtgagccaagattgtaccattgtactccagcctgggtgacaagagcaaaactcagcctcaaaacaaaacaaaacaaaacaaacaaaaaaaaaaagagaggaaaaaaaggaaagaaaataaaaatataccttaccttctaatcctagtacctcttattccttttacttgtcatatttcattggctgagatttctattttaaggccgaaaagtggtggtgaaagtaaacatccttgtcttttttttttttttttttttgagacggagtcttgctctgtcacccaggctggagtgcagtggtgcgatctcggctcactgcaagctccgtctcctgggttcacaccattctcctgcctcagcctcccgagtagctgggactacaggcgcctgccaccatgcccagctaaatttttgtatttttagtggaaacggggtttcaccatgttagccaggatggtctccatctcctgacctcgtgatccacctgcctcggcctcccaaagtgctgggattacaggcgtgagccaccgcgcctggccctaaacatccttgtcttgtatgatattgaaaatattccttaaaagtagtatgtagtatgtttatatagggttataatttggaaaattctctattgtctgtaatggcttccatttccaaatttccaagatgcttaattattgctaaaagtagactgaataacaatccaggtaaagcactttctcgggtgctaacaggcatttctcccaacagctttcttgggagaaaatacattaataaccttggtttgtttatttgtttaattatttttagataatgagaaggaaagattatcaagcattgaaaagattaaacagctaagagaacaagttaatgacctctttagccgaaaatttggtaagtttttatatctttttatatccagaattcatatacctaaaatacttctttttaaaagaatacttggccaggtgcattggctcatacctgtaatcctagcactttaggaggctaaggctagagaatcacttgagcccaggcgtttgagaccagcctgggcagcaaagtgacaccccaggtctacaaaaggaaaaaaaacaaaactttatcttataagaatttgatcttggctgggcgcagtggttcacacttttaatcccagcactttgggaggccaaggtgggtggatcacttgaggccaggagttcaagtccagcctggccaacatggcaaaatcccatctctactaaaaatacaaaaaattagccgggtgtggtggcgcacacctgtaatcccagctactcaggaggctgaggcacgagaattggttgtaactgggaggcagaggttgcagtgagcttagatcgcgctattgcactccagcctgggcgacagagcaagaccctgtctcaaaaaaaaaaaaaaaaaaaagaaattgatctttttgtgaaagagctatgataaaaattagtcaatatgtctttttacagaagagcttttgcatggtatcattgactaattacaataataataataatagctatctttgttttactgagtgcttaccttgtgtattattttttgtgctcaacatgtgtttgatcatttaatccttacataaaacctttcaggtaggcgccatgataaccctgtgtaatggatggagaaactgagtttgcctactacccatgctaattccaaacttttaaaattatattcacacatcatagtagcactggaaaataaaatgactgatcataagtattgtcatttgatgcttctaaatcctgacattaaagataaatcctggtttaggaaatgtaaggaacaaactcagctagttttatttgtgttgttgtttttttaatttgttgttttgttttgtgttgttttgttttgaggcagggtctcgctctgtctctcaggctggagtgcagtggggcgatctcggctcactgcaacttctgcctcctgggtccctcccatgtggctgggattacaggcatgcgccaccacgcccagctaatttttgtatttttagtagagacagggtttcaccatgttagccaggctggtctcgaactcctggcctcaagtgattcacccgcctcagtctcccagagggctgggattacaggtgtgagccaccgtgcccagccaaactcagctggttttatgctgctcatcccgtcacaggtgaagcaattggcgtggatttccctgtgaaagttccctacaggaagatcacattcaaccctggctgtgtggtgattgatggcatgccccgggggtggtattcaaggaccccggctatctggaaatcagttccatgaggaggatcttggaggcagctgagtttatcaaattcacagtcatcaggtaagtgagtcaagagaaggaatctggagactctgacttgcccgaggtgggcatgtggctgcccaggaatgtctgtcccatgacttgggctgggggtttgttcccgcagctgaccgctgggccatgctgcctctcacactgacttcatcatcttctgcttccttgagatgtgtccatgtccctgttcctcggtgatcatgggcagcccgtcccagttttagctcacccagcacctagcgtagagttaacactctgcaaaaatttgtccaataaaactaagtggggccaggcacggtggctcacgcctgtaatcccagcactttgggaggctgaggcgggccagatcgcctgaggtcaggagtatgaggcaagcctggccaacatggtgaaaccccgttgctactgaaaatacaaacattagtcgggtgtggtggcgtgcgcctctaataccagctactcaggaggctgaggcgtgagaatcacttgacctgggaggtggaggttgcagtgacctgagatggcaccactgcactccagcctgggcagcagaatgagcctccatctcaaaacataaataaataggctgggcatggtggctcaggcctgtaatcccagcattttaggaggctgaggcaggtggatcatttgaggtcaggagtttgagaccagcctggccaacatggtgaaactccatctctactaaaaataaacattagctgggtgtagtggtacgtgcctgtaatcccagctactcaggagaatcacttgaacctggaatgcggaggttgcagtgagcccagatgacaccactgcactccagcctgggtgatggagtgagactccgtctcaaaaaaaacaaaaacaaaaggctcaacgcagtggctcatgcctgtaatcccagcactttgggaggccaaggtaggtagatctcctgatgtcaggagttcaagagtagcctggccaacatggtgaaactaaaaatacaaaaaattagctgggcgtggtggcgggcacctgtaatcccagctactcaggcggctgaggcaggagaatggcttgaacccaggaggcggaggttgcgctaagccgagatcgcgccactgcactccagcctgggtgacgcagcgagactcttgtctcaaaaaaaacaaaaacaaaacaaacaaataaataaatattcttctgtaaaaaaataaataagtaaaaattaaaaaaaaataaaactaagtgggcaaaagaggaaacgtgagcttgtcgcatttatcaatgtgtctttctcttcaggccgcttccagggcttgagctcagtaatggtgagtattctacaggtgagaagaacgttccggcaatgttgggccatgggaagtgtcttggtgggcgctcaccacggggtttttgcttccgtgagcctgggacccaagtatgcagccttcgatgcatgctttatttttcctgcatgtgataaagttagataactctgttacttgagtttgattaaccagtctgaaggagagtgatctatatcacaccatgagtgtgacgtgtgatgtggcgcactctttttttttttttttggagacagagtctcgctctgtcacccaggctagagtgcagcacaatctcggctcaccacacaacctccgcctcccaggttcaagtgattctcctgcctcagcctcccgagtagctgggactataggcgtgtgccaccacgcctggctaatttttgtatttttagtagagatggggttttgccatgttggccaggctggtctcgaacttctgacctcaagggatccgcccgcctccacctttcaaagtgctgggattacgggcatgagccaccacgcatggctgatgtggcacactattcaagtgtgctttgtggtgggggctcccctgaggccacccgcacagctgcactcaggatcacagtaccgatctcctctgtgttggtaaatagtgcctgcctggccatgcagtcccaccctagtaccctccgaccgtggcttgacctccctacagtgctgaagcaaaaggagttccacctggcacagcagaggcccctagaacccttccagtgctgagactagcatctgttcttttttttttttgagacagagtctcgctctctcacccaggctggagtgcagtggcaagatctcggctcactgcaacctccgcctcccgggttcaagcgattctctgcctcagccttccgattagctgggattacaggtgcgtgccgccacatccagctactttttgtattttttagtagagacagggtttagccatgttggccaggctggtctcaaactcgtgacctcaagtgatccaccctccttggtctcccaaactgctgggattacagatgtaagccactgcacctggctcagcatctgttctgattgagcaatgcccaggcactctgcttctgaaatattctcttttttttccccttcaacttttattttaagttctagggtccatgttcaggatgtgcaggtttgttacataggtaaatgtgtgccatggtgatttgctgcacctatcaacccatcacctaggtgttaagcccagcatgcattagctattcttcctgatgctctccctccccctacccgcccccaccctgttaaatattcttaatgtcttccccggagcccttgcaagtgagtcagtatcctgtcaagtagaatacggagaggtgttctcacgagcatgagtcaccagggaacctcctaatgtaacatttgaaaaccaaagtaggctgggcgcggtgactcacacctgtaatcccagcactttgggaggccgaggcgggcggatcatgaggtcaggagatggagacccttctgtacaacgtggtgaaactccgtctctactagaaatacaaaaaattagccgggcatggtggcgcgtgcctataatcccagctactcgggaggctgaggcaggaaaatcacttgaaccagggagtcgggggttgcagtgagccgagatcgtgccactgcactccagtttggtgacagagcaagactctgtctcaaaaaaaaaaaaaaaaagaaaagaaaagaaaaccaaagtatcctattaaaatgctccatttttattcccaaacgcatctgattgctaaatgattttttgatcttttataatatctttatttatttattgtattattattggggttttttagagacaaggtctcactctgtcacccaggctggagtgcagtggcatgatcatagctcactgcagcctggaactcctgccctcaggtgattctcccaccttcacctcccgagtagctgggacagcactgccatgcccagataattttttttttttttttgtagagacagggtctcactatgtttcccaggctggccttgagcttctggcttcaagcgatcctcctgcctcagcctcccaaagtgctgggactataggcatgagccgctgtacatggcctacattttcttaaggtgcacttttatgtgtgtgtactctggaaataccttgattacctgcagcgtggccaggttctttaaatctaaaacactagcccctgtacactcgaacacacttatatgaatgagttttgtgtggatctgtggccgtcacccttgtcatttgagactcacagtaggtaaaaatcatatgcctttctgtgctcattcccatctctgttattacaaagttttcttgggaatcaaatgagaaaatatattaaaatgctcacacgtataatcccaggacttttggaggccaaggcaagaggattgcttgaggccaggagtttgagaccagcctgggcaacatagcaagaccccatctctacaaaaaatttaaaaattagctggacacagtggctcacacctgtagccccagctacttggcaggctaaagcaggaggatcacttaaacccaggagtttgagacagcagagaaccataattgcaatactacactccagcctgggtgacagaacaagaccctgtctctaaaaagaaaatgcaaacatattatcaaataattcctgtttaaactggacataacaagcacagctacatgctgaacctcatcaaaggtgtcttttgtttggctcatgtacttttgaaaataaggatgaggcctggcacagtggctcctataatcccagcactttgggaggccaaggcgggtggatcgcttgagcctggggtttcagaccagcctaggcaacaaggtaagactccagctctacaaaaaaagaaaaaaaaaaaaagaaaaagaaaaaaagaaaagaaagaaagaaagaaaagatagctcagtgtggtgcatgcctgtagtcccagcaactgggagctgaagtgggaggatcacctgagcccagggagttccaggctgcagtgagccattatcaccacaaaccaggcactctttcataaaagtcaatcttcaggttttctttagaaaacctgaagatctggctgggtgcagtggctcatgcctgtaatcccagcactttgggaggctgaggtgggcggatcacctgaggtcaggagttcgagaccagcctggacaacatggtgaaatctcatctctactaaaaatacaaaaattagctgggcgtggtggcaggcacctgtcataacagctactcaggaggctgaggcagaagaatcgcttgaacccaggaggcagaagttgcagtgagccgagattgcgccactgcactgcagcctgggtgacagagcaaaactccgtctcaacaacaacgacaacaaaaattcagtcttcaggttttctttagaaaacttgaagatctggccacagctggcgtcctggcagcggtttgctggagttgatggtcagccgtccctctgcagggtgggtcaccctcctgttaaccacgccctgccccgccccgcttcctccctctcgtgcgtcatcaagcatttgctgttgttttcctcatagtagtgataagagaaaagtgaaatatctttgtctccctgtctctgtcaaaagtgggaaaatgcaagatagaccaggagggccgtgtgtttcaagaaaagtgggagagagcatttttcttcgtggaagtacagaatattccaacatgtctcatatgcaaacaaagcatgtctgtgtccaaagaatataacctaagacgccactatcaaaccaatcacagcaagcattatgaccagtatacggaaagaatgcgtgacgagaagcttcacgagctgaaaaaagggctcaggaagtatctcttaggctcgtcagacaccgagtgtcccgagcaaaaacaagtgtttgcaaacccaagtccaacccagaaatcccccgtgcagcctgtagaggacctagctgggaacttatgggagaagttacgtgaaaaaatcaggtcttttgtggcatattctatcgcaatcgatgagatcaccgatataaataataccacccagttggccatattcatccgtggtgtcatagtgaatttcgatgtgtccgaagaacttctggatacggtgcccacgacgggtacaaaatctggaaacgagatcttttcgcgtgttgagaagagcctgaaaaagttctgtatcgactggtcgaaattagtaagcgtggcctccactggcaccccagcgatggtggatgccaataacgggcttgttacaaaactgaagtccagggtggcgacgttctgcaagggtgcggaactgaagtccatctgttgtataattcatccgaaatcactctgtgctcagaagttgaagatggaccacgtcatggacgtggtagtgaagtccgtgaactggatatgctcccggggactgaaccacagcgagttcacaaccttgctctatgagctggacagccagtatggtagcctcctgtactacacggagattaagtggctcagtcgcgggctcgtgctaaagagatttttcgaatccttggaagaaatcgactccttcatgtcatccagagggaaacccctgcctcaactgagctccatagattggatccgagacctggccttcttggttgacatgacgatgcatctgaacactttgaacatctctctccaaggacactcccaaatcgtcacgcagatgtatgacctgatccgggtgttcctagcaaaactgtgcctctgggagactcacttgacgaggaataatctggcccactttcccaccctgaaattggtttccagaaatgaaagcgatggcctgaactacattcccaaaatcgcggaactcaagaccgaattccagaaaaggctgtctgatttcaaactctacgaaagcgaactgactctgttcagctccccgttctccacgaagatcgacagtgtgcacgaggagctccagatggaggttatcgacctgcaatgcaacgcggtcctgaagacgaaatacgacaaggtgggaataccagaattctacaagtacctctggggtagctacccgaaatacaagcaccattgcgcaaagattctttccatgttcgggagcacctacatctgcgaacagctgttctccattatgaaactgagcaaaacaaaatactgctcccagttaaaggattcccagtgggattctgtactccacatcgcaacgcgatggagagaaaactcctggcagggccctatggtgggaaaggctggagtcttctagtcccaagggattgggagatgacaaaatgaatttttttttcttttttgagatggagtcttgctctgtcgcccaggttggagtgcagtggcgtgatctcggcttactgcaacttccagctcctgggttcgaacgattctcctgcctcagcctcccgagcagctgggactacaggcgtgcgccaccatgcccggctaatttttgtattagtagagatgaggtttcaccatgttggccaggctggtctccaactcctgacctcaggtgatccacctgcctcgacctcacaaagtgctgggattacaggcatgaaccactgtgcccagctgacgaaatgagttcttaaactttttttttttcagttttttttccactttgaatcagaaatataatctgcagtatcatacttgtttatattacattgtatgcctcactattcattaaaaatcaagaaagttttattgta

SEQ ID NO: 2112 - DNA, 10907 bp, Homo sapiens
attcttggtaaattctaaacttcaacttctgttttaaggaaacacaaattcatccagtgttacaaattctgcagcaggtgttgaagatcttaacatcgttcaagtgactgttccaggtatggactaatgttacatttttccttttgtcttaattattttttgacataggctggtctcttggacctgtcatttttcacttagttcaccctgatagctaagaaatgacatttcgggaatataaaatattctgcaagttgctacacaacgagcatcttgctcacatcagacattattaatcggatattttgcttctcctggacaagcccgggcattacctggaaaatgcatctcagagcaggcagcacggagcaccagctatggttgaattggaattggccacagaggtgaaatgttttgttgctcatcattaacaatcttctggccgggcacggtggcttacgcctgtaatcccagcactttgggaggctaagacgggcagatcacgaggtcaggagatcgagaccatcctggataacacggtgaaaccctgtctctactaaaaatacaaaaaaattagccgggtgtggtggcgagcacctgtagtcccagctactcgggaggctgaggctgaagaatggcgtgaacctgggaggtggagcttgcagtgagcggagatcacaccactgcactccagcctgggtgacagagcgagactctgtctcaaaaaaataaataataataataataataatcttcttttctgaatatgtgtatgtaaaatatatctggaaagatacaagagaatctaattacatagttcctccagggaaggaaactgaccgctgagatagggataggagagagacgtttgagatgtttctgtatattactcctcttgaatgttgagccatgtgattgctttagttattcaaaagtaaataaagttttaaagtgttgaaaaatatctaaaaaataaaaacaaaaaaaaaggaccaggcatggtggcatgtgcctgtaatctcagcactttgggaagctgaggcaggaggatcacttgagcccaggagtttgagaccagcctgcacagcacagtgagactctgtctctaaaaaacaaaaagaaaagaaaaacagaccgggtgcggtggctcacacctgtaatcccagcactttgggaggctgaggcaggtggatcacctgaggtcaggagttcgagaccagcctggccaacatggtgaaaccccatctttactaaaaatacaaaaatcagctggtgtggtggtgggtgcctgtaatcccagctacttgggaggctgaggcaggagaattgcttgaacccaggaggggtgcagtgaattgcttgaacccaggagtttgcagtgagccaagattgtaccattgtactccagcctgggtgacaagagcaaaactcagcctcaaaacaaaacaaaacaaaacaaacaaacaaaaaaagagaggaaaaaaaggaaagaaaataaaaatataccttaccttctaatcctagtacctcttattccttttacttgtcatatttcattggctaagatttctattttaaggccgaaaagtggtggtgaaagtaaacatccttgtctttttttttttttttttttttttgagacggagtcttgctctgtcacccaggctggagtgcagtggcgcgatctcggctcactgcaagctccgcctcctgggttcacgccattctcctgcctcagcctcccgagtagctgggactacaggcgcctgccaccatgcccggctaaatttttgtatttttagtagaaacggggtttcaccatgttagccaggatggtctcaatctcctgacctcgtgatccacctgcctcggcctcccaaagtgctgggattacaggcgtgagccaccgcgcctggccctaaacatccttgtcttgtatgatattgaaaatattccttaaaagtagtatgtagtatgtttatatagggttataatttggaaaattctctattgtctgtaatggcttccatttccaaatttccaagatgcttaattattgctaaaagtagactgaataacaatccaggtaaagcactttctcgggtgctaacaggcatttctcccaacagctttcttgggagaaaatacattaataaccttggtttgtttatttgtttaattatttttagataatgagaaggaaagattatcaagcattgaaaagattaaacagctaagagaacaagttaatgacctctttagccgaaaatttggtaagtttttatatctttttatatccagaattcatatacctaaaatacttctttttaaaagaatacttggccaggtgcattggctcatacctgtaatcctagcactttaggaggctaaggctagagaatcacttgagcccaggagtttgagaccagcctgggcagcaaagtgacaccccaggtctacaaaaggaaaaaaacaaaactttatcttataagaatttgatcttggctgggcgcagtggttcacacttttaatcccagcactttgggaggccaaggtgtgtggatcacttgaggccaggagttcaagtccagcctggccaacatggcaaaatcccatctctactaaaaatacaaaaaaattagccgggtgtggtggcgcacacctgtaatcccagctactcaggaggctgaggcacgagaatcggttgtaactgggaggcagaggttgcagtgagcttagatcgcgctattgcactccagcctgggcgacagagtgagaccctgtctcaaaaaaaaaaaaaaaaaaagaaattgatctttttgtgaaagagctatgataaaaattagtcaatatgtctttttacagaagagcttttgcatggtatcattgactaattacaataataataataatagctatctttgttttactgagtgcttaccttgtatattattttttgtgctcaacatgtgtttgatcatttaatcctcacataaaacctttcaggtaggcgccatgataaccctgtgtaatggatggaggaactgagtttgcctactacccatgctaattccaaacttttaaaattatattcacacatcatagtagcactggaaaataaaatgactgatcataagtattgtcatttgatgcttctaaatcctgacattaaagaaaaatcctggtttaggaaacgtaaggaacaaactcagctagttttatttgtgttgttgtttttttaatttgttgttttgttttgtgttttgttttgaggcagggtctcgctctgtctctcaggctggagtgcagtggggcgatctcggctcactgcaacttctgcctcctgggtccctcccatgtggctgggattacaggcatgcgccaccacgcccagctaatttttgtatttttagtagagacagggtttcaccatgttagccaggctggtctcgaactcctggcctcaagtgattcacccgcctcagtctcccagagggctgggattacaggtgtgagccaccgtgcccagccaaactcagctggttttatgctgctcatcccgtcacaggtgaagcaattggcgtggatttccctgtgaaagttccctacaggaagatcacattcaaccctggctgtgtggtgattgatggcatgcccccgggggtggtattcaaggcccccggctatctggaaatcagttccatgaggaggatcttggaggcagctgagtttatcaaattcacagtcatcaggtaagtgagtcaaaagaaggaatctggagactctgacttgcccgaggtgggcatgtggctgcccaggaatgtctgtcccatgacttgggctgggggtttgttcccgcagctgaccgctgggccatgctgcctctcacactgacttcatcatcttctgcttccttgagatgtgtccatgtccctgttcctcggtgatcatgggcagcccgtcccagttttagctcacacagcacctagcgtagagttgatactctgcaaaaatttgtccaataaaactaagtggggccaggcacggtggctcacgcctgtaatcccagcactttgggaggctgaggcgggccagatcgcctgaggtcaggagtatgaggcaagcctggccaacatggtgaaaccccgttgctactgaaaatacaaacattagtcgggtgtggtggcgtgcgcctctaataccagctactcaggaggctgaggcgtgagaatcacttaacctgggaggtggaggttgcagtgacctgagatggcaccactgcactccagcctgggcagcagaatgagcctccatctcaaaacataaataaataggccgggcatggtggctcaggcctgtaatcccagcattttaggaggctgaggcaggtggatcatttgaggtcaggagtttgagaccagcctggccaacatggtgaaactccatctctactaaaaataaacattagctgggtgtagtggtacgtgcctgtaatcccagctactcaggagaatcacttgaacctggaatgtggaggttgcagtgagcccagatgacaccactgcactccagcctgggtgatggagtgagactccgtctcaaaaaaaacaaaaacaaaaggctcaacgcagtggctcatgcctgtaatcccagcactttgggaggccaaggtaggtagatctcctgatgtcaggagttcaagagtagcctggccaacatggtgaaactaaaaatacaaaaaattagctgggcgtggtggcgggcacctgtaatcccagctactcaggcggctgaggcaggagaatggcttgaacccaggaggcggaggttgcgctaagccgagatcgcgccactgcactccagcctgggtgacgcggcgagactcttgtctcaaaaaaaacaaaaacaaaacaaacaaataaataaatattcttctgtaaaaaaataaataagtaaaaattaaaaaaaaataaaactaagtgggcaaaagaggaaatgtgagcttgtcacatttatcaatgtgtctttctcttcaggccgcttccagggcttgagctcagtaatggtgagtattctacaggtgagaagaacgttccggcaatgttgggccatgggaagtgtcttggtgggcgctcaccacggggtttttgcttccgtgagcctgggacccaagtatgcagccttcgatgcatgctttatttttcctgcatgtgataaagttagataactctgttacttgagtttgattaaccagtctgaaggagagtgatctatatcacaccatgagtgtgacgtgtgatgtggcgcactcttttttttttttttggagacggagtctcgctctgtcacccaggctagagtgcaatggcacaatctcggctcaccacacaacctccgcctcccgggttcaagtgattctcctgcctcagcctcccgagtagctgggactataggcgtgtgccaccacgcctggctaatttttgtatttttagtagagatggggttttgccatgttggccaggctggtcttgaacttctgacctcaagggatctgcccgcctccaccttccaaagtgctgggattacgggcatgagccaccacgcatggctgatgtggcacactattcaagtgtgctttgtggtgggggctcccctgaggccacccgcacagctgcactcaggatcacagtaccgatctcctctgtgttagttggtaaatagtgcctgcctggccatgcagtcccaccctagtaccctccgaccgtggcttgacctccctacagtgctgaagcaaaaggggttccacctggcacagcagaggcccctagaacccttccagtgctgagactagcatctgttcttttttttttctttttttttttttttgagacagagtctcgctctctcacccaggctggagtgcagtggcaagatctcggctcactgcaacctccgcctcccgggttcaagcgattctctgcctcagccttccgattagctgggattacaggtgcgtgccgccacatccagctactttttgtattttttagtagagacagggtttagccatgttggccaggctggtctcaaactcgtgacctcaagtgatccacccgccttggtctcccaaactgctgggattacagatgtaagccactgcacctggctcagcatctgttctgattgagcaatgcccaggcactctgcttctgaaatattctcttttttttccccttcaacttttattttaagttccagggtccatgtgcaggatgtgcaggtttgttacacaggtaaacgtgtgccatggtggtttgctgcacctatcaacccatcacctaggtattaagcccagcatgcattagctattcttcctgatgctctccctccccccgcccccaccctgttaaatattcttaatgtcttccccggagcccttgcaagtgagtcagtatcctgtcaagtagaatacggagaggtgttctcacgagcatgagtcaccagggaacctcctaatgtaacatttgaaaaccaaagtaggctgggcgcggtgactcacacctgtaatcccagcactttgggaggccgaggcgggcggatcatgaggtcaggagatggagacccttctgtacaacgtggtgaaactccgtctctactagaaatacaaaaattagtcgggcatggtggcgcgtgcctataatcccagctactcgggaggctgaggcaggaaaatcacttgaaccagggagtcgggggttgcagtgagccgagatcgtgccactgcactccagtttggtgacagagcaagactctgtctcaaaaaaaaaaaaaaagaaaagaaaagaaaaccaaagtatcctattaaaatgctccatttttattcccaaacgcatctgattgctaaatgattttttgatcttttataatatctttatttatttattgtattattattggggttttttagagacaaggtctcactctgtcacccaggctggagtgcagtggcatgatcatagctcactgcagcctggaactcctgccctcaggtgattctcccaccttcacctcccgagtaactgggacagcactgccatgcccagataatttttttttttttttttttttgtagagacagggtctcactatgtttcccaggctggccttgagcttctggcttcaagcgatcctcctgcctcagcctcccaaagtgctgggattataggcatgagccgctgtacatggcctacattttcttaaggtgcacttttatgtgtgtgtactctggaaataccttgattacctgcagggtggccaggttctttaaatctaaaacactagcccctgtacactcgaacacacttatacgaatgagttttgtgtggttctgtggccgtcacccttgtcatttgagactcacagtaggtaaaaatcatatgcctttctgtgctcattcccatctctgttattacaaagttttcttgggaatcaaatgagaaaatatattaaaatgctcacacctataatcccaggacttttggaggccaaggcaagaggattgcttgaggccaggagtttgagaccagcctgggcaacatagcaagaccccatctctacaaaaaatttaaaaattagctggaaacagtggctcacacctgtagccccagctacttggcaggctaaagcaggaggatcacttaaactcaggagtttgagacagcagagaaccataattgcaatactacactccagcctgggtgacagaacaagaccctgtctctaaaaagaaaatgcaaacatattatcaaataattcctgtttaaactggacataacaagcacagctacatgctgaacctcatcaaaggtgtcttttgtttggctcatgtacttttgaaaataaggatgaggcctggcacggtggctcctgtaatcccagcactttgggaggccaaggcgggtggatcgcttgagcctggggtttcagaccagcctgggcaacaaggtaagactccagctctacaaaaaaaaaaaaaaaaagaaaaagaaaaaaagaaaagaaagaaagaaagaaaagatagctcggtgtggtgcatgcctgtagtcccagcaactgggagctgaagtgggaggatcacctgagcccagggagttccaggctgcaatgagtcattatcaccacaaaccaggcactctttcataaaagtcaatcttcaggttttctttagaaaacctgaagatctggctgggtgcagtggctcatgcttgtaatcccagcactttgggaggctgaggtgggcggatcacctgaggtcaggagttcgagaccagcctggacaacatggtgaaatctcatctctactaaaaatacaaaaattagctgggcgtggtggcaggcacctgtcataacagctactcaggaggctgaggcagaagaatcgcttgaacccaggaggcagaagttgcagtgagccgagattgcgccactgcactgcagcctgggcgacagagcaaaactccgtctcaacaacaacgacaacaaaaattcagtcttcaggttttctttagaaaacttgaagatctggccacagctggcatcctggcagcggtttgctggagttgagggtcagccgtccctctgcagggtgggtcaccctcctgttaaccacgccctgccccgccccgcttcctccctctcgtgcgtcatcaagcatttgctgttgttttcctcatagtagtgataagagaaaagtgaaatatctttgtctccctgtctctgtcaaaagtgggaaaacgcaagatagaccaggagggccgtgtgtttcaagaaaagtgggagagagcgtatttcttcgtggaagtacagaatattccaacatgtctcatatgcaaacaaagcatgtctgtgtccaaagaatataacctaagacgccactatcaaaccaatcacagcaagcattatgaccagtatatggaaagaatgcgtgacgagaagcttcacgagctgaaaaaagggctcaggaagtatctcttaggctcatcagacaccgagtgtcccgagcaaaaacaagtgtttgcaaacccaagtccaacccagaaatcccccgtgcagcctgtagaggacctagctgggaacttatgggagaagttacgtgaaaaaatcaggtcttttgtggcatattctatcgcaatcgatgagatcacggatataaataataccacccagttggccatattcatccgtggtgtcgatgagaatttcgatgtgtccgaagaacttctggacacggtgcccatgacgggtacaaaatctggcaacgagatcttttcgcgtgttgagaaaagcctgaaaaacttctgtatcgactggtcgaaattagtaagcgtggcctccactggcaccccagcgatggtggatgccaataacgggcttgtcacaaaactgaagtccagggtggcgacgttctgcaagggtgcggaactgaagtccatctgttgtataattcatccggaatcactctgtgctcagaagttgaagatggaccacgtcatggacgtggtagtgaagtccgtgaactggatatgctcccggggactgaaccacagtgagttcacaaccttgctctatgagctggacagccagtatggtagcctcctgtactacacggagattaagtggctcagtcgcgggctcgtgctaaagagatttttcgaatccttggaagaaatcgactccttcatgtcatccagagggaaacccctgcctcaactgagctccatagattggatccgagacctggccttcttggttgacatgacgatgcatctgaacgctttgaacatctctctccaaggacactcccaaatcgtcacgcagatgtatgacctgatccgggcgttcctagcaaaactgtgcctctgggagactcatttgacgaggaataatctggcccactttcccaccctgaaattggcttccagaaatgaaagcgatggcctgaactacattcccaaaatcgcggaactcaagaccgaattccagaaaaggctgtctgatttcaaactctacgaaagcgaactgactctgttcagctccccgttctccacgaagatcgacagtgtgcacgaggagctccagatggaggttatcgacctgcaatgcaacacggtcctgaagacgaaatacgacaaggtgggaataccagaattctacaagtacctctggggtagctacccgaaatacaagcaccattgcgcaaagattctttccatgttcgggagcacctacatctgcgaacagctgttctccattatgaaactgagcaaaacaaaatactgctcccagttaaaggattcccagtgggattctgtactccacatcgcaacgtgatggagagaaaactcctggcagggccctatggtgggaaaggctggagtcttctagtcccaagggattgggagatgacaaaatgaatttttttttcttttttgagatggagtcttgctctgtcgcccaggttggagtgcagtggcgtgatctcggcttactgcaacttccagctcctgggttcgaacgattctcctgcctcagcctcccgagcagctgggactacaggcgtgcgccaccatgcctggctaatttttgtattagtagagatgaggtttcaccatgttggccaggctggtctccaactcctgacctcaggtgatccacctgcctcgacctcacaaagtgctgggattacaggcatgaaccactgtgcccagctgacaaaatgagttcttaaacttttttttttttcagttttttttccactttgaatcagaaatataatctgcagtatcatacttgtttatattacattgtatgcctcactattcattaaaaatcaagaaagttttattgta

SEQ ID NO: 2113 - DNA, 10867 bp, Homo sapiens
ggaaacacaaattcatccagtgttacaaattctgcagcaggtgttgaagatcttaacatcgttcaagtgactgttccaggtatggactaatgttacatttttccttttgtcttaattattttttgacataggctggtctcttggacctgtcatttttcacttagttcaccctgatagctaagaaatgacatttcgggaatataaaatattctgcaagttgctacacaacgagcatcttgctcacatcagacattattaatcggatattttgcttctcctggacaagcccgggcattacctggaaaatgcatctcagagcaggcagcacggagcaccagctatggttgaattggaattggccacagaggtgaaatgttttgttgctcatcattaacaatcttctggccgggcacggtggcttacgcctgtaatcccagcactttgggaggctaagatgggcagatcacgaggtcaggagatcgagaccatcctggataacacggtgaaaccctgtctctactaaaaatacaaaaaaattagccgggtgtggtggcgagcacctgtagtcccagctactcgggaggctgaggctgaagaatggcatgaacctgggaggtggagcttgcagtgagcggagatcacaccactgcactccagcctgggcgacagagcgagactctgtctcaaaaaaataaataataataataataataatcttcttttctgaatatgtgtatgtaaaatatatctggaaagatacaagagaatctaattacatagttcctccagggaaggaaactgaccgctgagatagggataggagagagacgtttgagatgtttctgtatattactcctcttgaatgttgagccatgtgattgctttagttattcaaaagtaaataaagttttaaagtgttgaaaaatatctaaaaaataaaaacaaaaaaaaaggaccaggcatggtggcatgtgcctgtaatctcagcactttgggaagctgaggcaggaggatcacttgagcccaggagtttgagaccagcctgcacagcacagtgagactctgtctctaaaaaacaaaaagaaaagaaaaacagaccgggtgcggtggctcacacctgtaatcccagcactttgggaggctgaggcaggtggatcacctgaggtcaggagttcgagaccagcctggccaacatggtgaaaccccatctttactaaaaatacaaaaatcagctggtgtggtggtgggtgcctgtaatcccagctacttgggaggctgaggcaggagaattgcttgaacccaggaggggtgcagtgaattgcttgaacccaggagtttgcagtgagccaagattgtaccattgtactccagcctgggtgacaagagcaaaactcagcctcaaaacaaaacaaaacaaaacaaacaaacaaaaaaagagaggaaaaaaaggaaagaaaataaaaatataccttaccttctaatcctagtacctcttattccttttacttgtcatatttcattggctaagatttctattttaaggccgaaaagtggtggtgaaagtaaacatccttgtctttttttttttttttttttttttgagacggagtcttgctctgtcacccaggctggagtgcagtggcgcgatctcggctcactgcaagctccgcctcctgggttcacgccattctcctgcctcagcctcccgagtagctgggactacaggcgcctgccaccatgcccggctaaatttttgtatttttagtagaaacggggtttcaccgtgttagccaggatggtctcaatctcctgacctcgtgatccacctgcctcggcctcccaaagtgctgggattacaggcgtgagccaccgcgcctggccctaaacatccttgtcttgtatgatattgaaaatattccttaaaagtagtatgtagtatgtttatatagggttataatttggaaaattctctattgtctgtaatggcttccatttccaaatttccaagatgcttaattattgctaaaagtagactgaataacaatccaggtaaagcactttctcgggtgctaacaggcatttctcccaacagctttcttgggagaaaatacattaataaccttggtttgtttatttgtttaattatttttagataatgagaaggaaagattatcaagcattgaaaagattaaacagctaagagaacaagttaatgacctctttagccgaaaatttggtaagtttttatatctttttatatccagaattcatatacctaaaatacttctttttaaaagaatacttggccaggtgcattggctcatacctgtaatcctagcactttaggaggctaaggctagagaatcacttgagcccaggagtttgagaccagcctgggcagcaaagtgacaccccaggtctacaaaaggaaaaaaacaaaactttatcttataagaatttgatcttggctgggcgcagtggttcacacttttaatcccagcactttgggaggccaaggtgtgtggatcacttgaggccaggagttcaagtccagcctggccaacatggcaaaatcccatctctactaaaaatacaaaaaaattagccgggtgtggtggcgcacacctgtaatcccagctactcaggaggctgaggcacgagaatcggttgtaactgggaggcagaggttgcagtgagcttagatcgcgctattgcactccagcctgggcgacagagtgagaccctgtctcaaaaaaaaaaaaaaaaaaagaaattgatctttttgtgaaagagctatgataaaaattagtcaatatgtctttttacagaagagcttttgcatggtatcattgactaattacaataataataataatagctatctttgttttactgagtgcttaccttgtatattattttttgtgctcaacatgtgtttgatcatttaatcctcacataaaacctttcaggtaggcgccatgataaccctgtgtaatggatggaggaactgagtttgcctactacccatgctaattccaaacttttaaaattatattcacacatcatagtagcactggaaaataaaatgactgatcataagtattgtcatttgatgcttctaaatcctgacattaaagataaatcctggtttaggaaacgtaaggaacaaactcagctagttttatttgtgttgttgtttttttaatttgttgttttgttttgtgttttgttttgaggcagggtctcgctctgtctctcaggctggagtgcagtggggcgatctcggctcactgcaacttctgcctcctgggtccctcccatgtggctgggattacaggcatgcgccaccacgcccagctaatttttgtatttttagtagagacagggtttcaccatgttagccaggctggtctcgaactcctggcctcaagtgattcacccgcctcagtctcccagagggctgggattacaggtgtgagccaccgtgcccagccaaactcagctggttttatgctgctcatcccgtcacaggtgaagcaattggcgtggatttccctgtgaaagttccctacaggaagatcacattcaaccctggctgtgtggtgattgatggcatgcccccgggggtggtattcaaggcccccggctatctggaaatcagttccatgaggaggatcttggaggcagctgagtttatcaaattcacagtcatcaggtaagtgagtcaagagaaggaatctggagactctgacttgcccgaggtgggcatgtggctgcccaggaatgtctgtcccatgacttgggctgggggtttgttcccgcagctgaccgctgggccatgctgcctctcacactgacttcatcatcttctgcttccttgagatgtgtccatgtccctgttcctcggtgatcatgggcagcccgtcccagttttagctcacacagcacctagcgtagagttgatactctgcaaaaatttgtccaataaaactaagtggggccaggcacggtggctcacgcctgtaatcccagcactttgggaggctgaggcgggccagatcgcctgaggtcaggagtatgaggcaagcctggccaacatggtgaaaccccgttgctactgaaaatacaaacattagtcgggtgtggtggcgtgcgcctctaataccagctactcaggaggctgaggcgtgagaatcacttaacctgggaggtggaggttgcagtgacctgagatggcaccactgcactccagcctgggcagcagaatgagcctccatctcaaaacataaataaataggccgggcatggtggctcaggcctgtaatcccagcattttaggaggctgaggcaggtggatcatttgaggtcaggagtttgagaccagcctggccaacatggtgaaactccatctctactaaaaataaacattagctgggtgtagtggtacgtgcctgtaatcccagctactcaggagaatcacttgaacctggaatgtggaggttgcagtgagcccagatgacaccactgcactccagcctgggtgatggagtgagactccgtctcaaaaaaaacaaaaacaaaaggctcaacgcagtggctcatgcctgtaatcccagcactttgggaggccaaggtaggtagatctcctgatgtcaggagttcaagagtagcctggccaacatggtgaaactaaaaatacaaaaaattagctgggcgtggtggcgggcacctgtaatcccagctactcaggcggctgaggcaggagaatggcttgaacccaggaggcggaggttgcactaagccgagatcgagccactgcactccagcctgggtgacgcggcgagactcttgtctcaaaaaaaacaaaaacaaaacaaacaaataaataaatattcttctgtaaaaaaataaataagtaaaaattaaaaaaaaataaaactaagtgggcaaaagaggaaatgtgagcttgtcacatttatcaatgtgtctttctcttcaggccgcttccagggcttgagctcagtaatggtgagtattctacaggtgagaagaacgttccggcaatgttgggccatgggaagtgtcttggtgggcgctcaccacggggtttttgcttccgtgagcctgggacccaagtatgcagccttcgatgcatgctttatttttcctgcatgtgataaagttagataactctgttacttgagtttgattaaccagtctgaaggagagtgatctatatcacaccatgagtgtgacgtgtgatgtggcgcactcttttttttttttttggagacggagtctcgctctgtcacccaggctagagtgcaatggcacaatctcggctcaccacacaacctccgcctcccgggttcaagtgattctcctgcctcagcctcccgagtagctgggactataggcgtgtgccaccacgcctggctaatttttgtatttttagtagagatggggttttgccatgttggccaggctggtcttgaacttctgacctcaagggatctgcccgcctccaccttccaaagtgctgggattacgggcatgagccaccacgcatggctgatgtggcacactattcaagtgtgctttgtggtgggggctcccctgaggccacccgcacagctgcactcaggatcacagtaccgatctcctctgtgttagttggtaaatagtgcctgcctggccatgcagtcccaccctagtaccctccgaccgtggcttgacctccctacagtgctgaagcaaaaggggttccacctggcacagcagaggcccctagaacccttccagtgctgagactagcatctgttcttttctttttctttttttttttttttgagacagagtctcgctctctcacccaggctggagtgcagtggcaagatctcggctcactgcaacctccgcctcccgggttcaagcgattctctgcctcagccttccgattagctgggattacaggtgcgtgccgccacatccagctactttttgtattttttagtagagacagggtttagccatgttggccaggctggtctcaaactcgtgacctcaagtgatccacccgccttggtctcccaaactgctgggattacagatgtaagccactgcacctggctcagcatctgttctgattgagcaatgcccaggcactctgcttctgaaatattctcttttttttccccttcaacttttattttaagttccagggtccatgtgcaggatgtgcaggtttgttacacaggtaaacgtgtgccatggtggtttgctgcacctatcaacccatcacctaggtattaagcccagcatgcattagctattcttcctgatgctctccctccccccgcccccaccctgttaaatattcttaatgtcttccccggagcccttgcaagtgagtcagtatcctgtcaagtagaatacggagaggtgttctcacgagcatgagtcaccagggaacctcctaatgtaacatttgaaaaccaaagtaggctgggcgcggtgactcacacctgtaatcccagcactttgggaggccgaggcgggcggatcatgaggtcaggagatggagacccttctgtacaacgtggtgaaactccgtctctactagaaatacaaaaattagtcgggcatggtggcgcgtgcctataatcccagctactcgggaggctgaggcaggaaaatcacttgaaccagggagtcgggggttgcagtgagccgagatcgtgccactgcactccagtttggtgacagagcaagactctgtctcaaaaaaaaaaaaaaagaaaagaaaagaaaaccaaagtatcctattaaaatgctccatttttattcccaaacgcatctgattgctaaatgattttttgatcttttataatatctttatttatttattgtattattattggggttttttagagacaaggtctcactctgtcacccaggctggagtgcagtggcatgatcatagctcactgcagcctggaactcctgccctcaggtgattctcccaccttcacctcccgagtaactgggacagcactgccatgcccagataatttttttttttttttttttttttgtagagacagggtctcactatgtttcccaggctggccttgagcttctggcttcaagcgatcctcctgcctcagcctcccaaagtgctgggattataggcatgagccgctgtacatggcctacattttcttaaggtgcacttttatgtgtgtgtactctggaaataccttgattacctgcagggtggccaggttctttaaatctaaaacactagcccctgtacactcgaacacacttatacgaatgagttttgtgtggttctgtggccgtcacccttgtcatttgagactcacagtaggtaaaaatcatatgcctttctgtgctcattcccatctctgttattacaaagttttcttgggaatcaaatgagaaaatatattaaaatgctcacacctataatcccaggacttttggaggccaaggcaagaggattgcttgaggccaggagtttgagaccagcctgggcaacatagcaagaccccatctctacaaaaaatttaaaaattagctggaaacagtggctcacacctgtagccccagctacttggcaggctaaagcaggaggatcacttaaactcaggagtttgagacagcagagaaccataattgcaatactacactccagcctgggtgacagaacaagaccctgtctctaaaaagaaaatgcaaacatattatcaaataattcctgtttaaactggacataacaagcacagctacatgctgaacctcatcaaaggtgtcttttgtttggctcatgtacttttgaaaataaggatgaggcctggcacggtggctcctgtaatcccagactttgggaggccaaggcggtgatcgcttgagcctgggtttcagaccagcctggcaacaaggtaagactccagctctacaaaaaaaaaaaaaaaagaaaaagaaaaaaagaaaagaaagaaagaaagaaaagatagctcggtgtggtgcatgcctgtagtcccagcaactgggagctgaagtgggaggatcacctgagcccagggagttccaggctgcaatgagtcattatcaccacaaaccaggcactctttcataaaagtcaatcttcaggttttctttagaaaacctgaagatctggctgggtgcagtggctcatgcctgtaatcccagcactttgggaggctgaggtgggcggatcacctgaggtcaggagttcgagaccagcctggacaacatggtgaaatctcatctctactaaaaatacaaaaattagctgggcgtggtggcaggcacctgtcataacagctactcaggaggctgaggcagaagaatcgcttgaacccaggaggcagaagttgcagtgagccgagattgcgccactgcactgcagcctgggcgacagagcaaaactccgtctcaacaacaacgacaacaaaaattcagtcttcaggttttctttagaaaacttgaagatctggccacagctggcatcctggcagcggtttgctggagttgagggtcagccgtccctctgcagggtgggtcaccctcctgttaaccacgccctgccccgccccgcttcctccctctcgtgcgtcatcaagcatttgctgttgttttcctcatagtagtgataagagaaaagtgaaatatctttgtctccctgtctctgtcaaaagtgggaaaacgcaagatagaccaggagggccgtgtgtttcaagaaaagtgggagagagcgtatttcttcgtggaagtacagaatattccaacatgtctcatatgcaaacaaagcatgtctgtgtccaaagaatataacctaagacgccactatcaaaccaatcacagcaagcattatgaccagtatatggaaagaatgcgtgacgagaagcttcacgagctgaaaaaagggctcaggaagtatctcttaggcttgtcagacaccgagtgtcccgagcaaaaacaagtgtttgcaaacccaagtccaacccagaaatcccccgtgcagcctgtagaggacctagctgggaacttatgggagaagttacgtgaaaaaatcaggtcttttgtggcatattctatcgcaatcgatgagatcacggatataaataataccacccagttggccatattcatccgtggtgtcgatgagaatttcgatgtgtccgaagaacttctggacacggtgcccatgacgggtacaaaatctggcaacgagatcttttcgcgtgttgagaagagcctgaaaaagttctgtatcgactggtcgaaattagtaagcgtggcctccactggcaccccagcgatggtggatgccaataacgggcttgtcacaaaactgaagtccagggtggcgacgttctgcaagggtgcggaactgaagtccatctgttgtataattcatccggaatcactctgtgctcagaagttgaagatggaccacgtcatggacgtggtagtgaagtccgtgaactggatatgctcccggggactgaaccacagtgagttcacaaccttgctctatgagctggacagccagtatggtagcctcctgtactacacggagattaagtggctcagtcgcgggctcgtgctaaagagatttttcgaatccttggaagaaatcgactccttcatgtcatccagagggaaacccctgcctcaactgagctccatagattggatccgagacctggccttcttggttgacatgacgatgcatctgaacgctttgaacatctctctccaaggacactcccaaatcgtcacgcagatgtatgacctgatccgggcgttcctagcaaaactgtgcctctgggagactcatttgacgaggaataatctggcccactttcccaccctgaaattggcttccagaaatgaaagcgatggcctgaactacattcccaaaatcgcggaactcaagaccgaattccagaaaaggctgtctgatttcaaactctacgaaagcgaactgactctgttcagctccccgttctccacgaagatcgacagtgtgcacgaggagctccagatggaggttatcgacctgcaatgcaacacggtcctgaagacgaaatacgacaaggtgggaataccagaattctacaagtacctctggggtagctacccgaaatacaagcaccattgcgcaaagattctttccatgttcgggagcacctacattctgcgaacagctgttctccattatgaaactgagcaaaacaaaatactgctcccagttaaaggattcccagtgggattctgtactccacatcgcaacgtgatggagagaaaactcctggcagggccctatggtgggaaaggctggagtcttctagtcccaagggattgggagatgacaaaatgaatttttttttcttttttgagatggagtcttgctctgtcgcccaggttggagtgcagtggcgtgatctcggcttactgcaacttccagctcctgggttcgaacgattctcctgcctcagcctcccgagcagctgggactacaggcgtgcgccaccatgcctggctaatttttgtattagtagagatgaggtttcaccatgttggccaggctggtctccaactcctgacctcaggtgatccacctgcctcgacctcacaaagtgctgggattacaggcatgaaccactgtgcccagctgacaaaatgagttcttaaacttttttttttttcagttttttttccactttgaatcagaaatataatctgcagtatcatacttgtttatattacattgtatgcctcactattcattaaaaatcaagaaagttttattgta

SEQ ID NO: 2114 - DNA, 89 bp, Homo sapiens
gctaggatcacaccactgcactccagcctgaatgacagagtaagaacctgtctcaaaaaaaaaaaaagaaaaaaaaaattcagtctggg

SEQ ID NO: 2115 - DNA, 509 bp, Homo sapiens
ttaagtcttgcacgttagcactgacccacaactgggcctcaactgtgctgtgttcacgtgaggaaagaatgaagggttgagggtacatgaggggggagaatggaaagaaaaggacgattcactcagacatagcccctttgctactggagtggacagataaatatcaaaggtaactccgcaggcctgcagccggtgaactcagttgaagtgcaagtatctaaaggaagtgaagttgaaagtgtgatttaaggctggcgtggtgggtggctcacacctgtaatcccagcactttgggagacccaggtgggtgaatcccttgaggccaggagttcaagaccagcctggccaacatggcgaaactctgtctctactaaaaatacaaaaattagagccgggcgtggtggctcacgcctgtaatcccagcactttgggaggcccaggtaggtgaatcacttgaggtcaggagttctcaaccagcatgaccaacacggtgaaactccgtctctact

SEQ ID NO: 2116 - DNA, 509 bp, Homo sapiens
ttaagtcttgcacgttagcactgacccacaactgggcctcaactgtgctgtgttcacgtgaggaaagaatgaagggttgagggtacatgaggggggagaatggaaagaaaaggacgattcactcagacatagcccctttgctactggagtggacagataaatatcaaaggtaactccgcaggcctgcagccggtgaactcagttgaagtgcaagtatctaaaggaagtgaagttgaaagtgtgatttaaggctggcgtggtgggtggctcacacctgtaatcccagcactttgggagacccaggtgggtgaatcccttgaggccaggagttcaagaccagcctggccaacatggcgaaactctgtctctactaaaaatacaaaaattagagccgggcgtggtggctcacgcctgtaatcccagcactttgggaggcccaggtaggtgaatcacttgaggtcaggagttctcaaccagcatgaccaacatggtgaaactccgtctctact

SEQ ID NO: 2117 - DNA, 444 bp, Homo sapiens
gcagagctgtccgcgggctgggcagcgtcgccgtctcccctgagccgcctcggtccggcaggagcggagccgaagcatcccttgctgcacgcagggcagagcaggcgagggctgggggccgatcggggaccccggcatctggcagtttccttgcaggttcaactttaattgccaagatttcacccctcctcctcaagcccagattatttatcctccctccggcctgggctgctggatgcagcagcggctgggcttggtcccaggagcagggagagtgcgctcccggccctcctagccgcgtgcccgggccatggtgcggctgagccccgcgcttgggtgaggcggcggcgcggctcggagcccggcggaccggtcctacgggacatcttcccctgaggaggagtcttcccctggggctgcgtgccgggggcgagcggcggccgc

SEQ ID NO: 2118 - DNA, 1354 bp, Homo sapiens
gcagagctgtccgcgggctgggcagcgtcgccgtctcccctgagccgcctcggtccggcaggagcggagccgaagcatcccttgctgcacgcagggcagagcaggcgagggctgggggccgatcggggaccccggcttgggaccccggcatctggcagtttccttgcaggttcaactttaattgccaagatttcacccctcctcctcaagcccagattatttatcctccctccggcctgggctgctggatgcagcagcggctgggcttggtcccaggagcagggagagtgcgctcccggccctcctagccgcgtgcccgggccatggtgcggctgagccccgcgcttgggtgaggcggcggcgcggctcggagcccggcggaccggtcctacgggacatcttcccctgaggaggagtcttcccctggggctgcgtgccgggggcgagcggcggccgcgatgttcagctggctgggtacggacgaccgccggaggaaggaccccgaggttttccagacggtgagtgaggggctcaagaaactctacaagagcaagctgctgcccttggaagagcattaccgcttccacgagttccactcgcccgccctggaggatgccgacttcgacaacaagcccatggttctgctggtgggccagtactccactgggaagaccaccttcatcaggtgagccggcccagggtcctggcagcccaccccggagcccagcgcctagtccctccggtcactcctggtgctccatcccagacaggggaccaatgggaagccttcagttgagggctctgaagagatctgtgtttgtgcaggcgtcaaaatcttaccccacaatttttgctggtcccccttcccatcctacccaatacctgtccactctacttggcccttggctgtggtggtcaacctgaagtattcaagtgtaaagccattcccagtctccccatcttatggatgatgaaaccgaggcccaggaggcacaatggaagagctcctggtctctggagcgccttatgttggtggggatgtcttacgtcttcactttttagcaacacatcattcacgggcaaaacctcttcccttgtttttcaaggggcttggcactcacatgggggcctcacagttgcagctgagttctgatgggtgcgggcctgggaacggaggtggcctggggatgctacttgtcctccttttatcatttccttctctaaagcagagctcctgtgtatatatcttggagactcaacagaagctgagtccagaagcagaatgctttttttttcccctttctcttatttgatcttaatggcttaataataatattaaagacgcttagagatg

SEQ ID NO: 2119 - DNA, 318 bp, Homo sapiens
cttgcagggattttgcttcttggcttgttttgttttgctggaatgaatgaataagtaaatgggaacgattttgacttcaccctaagcctagctaaaagtttgggtagtgacagttttggttattttgtgtaacctgatagtggatcccctttctatgccaaaaaaaaaaaaatcccccaatactagagtacctgttttcctagggaattgacctcagcaactgaaggagaggcgattcaaagcagggagtgtgatgaataggtcaactctgtcctcgcagccgtccctgagagggcgctgttcccaaatcgaagcccc

SEQ ID NO: 2120 - DNA, 1615 bp, Homo sapiens
tttttatcacataccaagatctgacaattctattccatgaaaaaaatcttttgagtctgacctcttctccaatcccattgcagctgtctcctaagttttggaatagtttcctaaatggtctcttggcctctgtattcgtctgttttcacactgctgtgaagaaatacctaagactgggtaatttataaaggaaaaaggtttaattaactcacagttctgcatgcctagagaggcctcaggaaacttacagtcatggcataaagggaagcaaacacgtccttcataaggcggcaggagagagaagtatgaggaaccaagtgggaagagccccttataaaaccatcagctctcacgagaactcactcactatcatgagaacagcatgaatgaaactgtccctatgatccaatctcctcccaccagctctctccctaaacgcatggggattatggggattacaattagagatgagatttatgcggggacacaaagcaaaaccatatcaacccccaacctcttttgcccctccaacactgctcttggcattccagttcctgcctggtccatagcctactccttcttcatctgtggaagggagggtagtgggagtcattagcctgggcagggaggagtgttttatcactacactgtttagaatggtgccaatacaaagcacatcaactttcagcaagtttattattgggtttaaattctctacacacgatgcactgcttttgcctacacctggacagtgttcccactcactctccttagtatgatgctggagataatatgatctgccatgaaggttaaataaagcaatgttcactgagaacttagcccaggcccctgcacatgctgagcattttgttaatgtaacaatgattagtaatagcattgctattggttccccatctctggcaaagcctttcatgcttggcctccctcactctctttcaccttcctaaaccctacactccagctatgccaaactgtttactctgccttggacacaccaagttcctcaagcctttgcaaatactccttacgctcctagaacaatggatgtcaattcatcatttaggatccagcttacagtcatgctttccatgaagccttcctcaaattagccacacaaaaggagtgactcctccctgtattcccatgaccctctgctcatgcctcctctttaaagcctgccttcactggagttcctggaagggagagtctgttcagcactcatctctgtatccacagtcaccaaaattgtaactgccccataataaattcccaatacttgcagggattttgcttcttggcttgttttgttttgctggaatgaatgaataagtaaatgggaacgattttgacttcaccctaagcctagctaaaagtttgggtagtgacagttttggttattttgtgtaacctgatagtggatcccctttctatgccaaaaaaaaaaaaaatcccccaatactagagtacctgttttcctagggaattgacctcagcaactgaaggagaggcgattcaaagcagggagtgtgatgaataggtcaactctgtcctcgcagccgtccctgagagggcgctgttcccaaatcgaagcccc

SEQ ID NO: 2121 - DNA, 3528 bp, Homo sapiens
agtgactcgcgactggtcggcgcggcgaaagcagagcggcgcgccggttccttggttcctgagggcgatggcgcggggtggctggcgccggctacgccgcctgttatccgcggggcagcttctattccagggccgcgcgctgctcgtcactaacacgctgggctgcggcgcgctcatggcggccggtgatggcgtgcgccagtcctgggagatccgcgcccggcccggccaggttttcgacccacggcgctccggtgaggacgccacgctgcttagtccttcaccccgggcgacctttgatcccgacacccgactgcgggccgtgacccctgacccgtggcctcagtcccccgcaggacccttgccctgaccgcgcctctccccgggtgtctgtctccccgcagctctgggtctccatcacctcccaacccccggaggtctctgcccactacccaggagcctctggagccgcgcctcctggtggggcttgtagtggaagaatgcacgggtgggctcttccggttttcccggtgaggctgaggctccgggatggcattgggcttacccaggccttagccagggagggagagagggaatggactgaggaacttgccggcccgacccagccccctgacttacactcttatagcgagcatgtttgcggtgggctgcagcatgggtcccttcctgcactactggtacttgtcgctggaccgcctattccctgcgtctggcctccgaggcttcccaaatgtcctcaagaaggtcctcgtggatcagctggtagcctctccattgctgggcgtctggtacttcttgggtaaggagcctcctaagcctaggctttgcctctcataggtcgggaggggtggagccagctttgtgttaagaaggatgcagaggtgcatttccaatttgccccctgtttgggtcgccctggactaggagccaggtcacagcggggacaggacggactcggccgatgtgaacgctggcgagtgtaggagggacgaggactgtatctgttggggctgccctgggcgggaggttgagagcatttcccaaagaaggggaccacactcagttgagacatgaagagggaaccagcgggcagagggaacagctaatgcaaaggctctgaggcctgaaggaagagaaattgaggctagacttaatggggtgcaaccgtgccagccctaggctcggtaaagacagcggtattaatagaggagtctctcattctccacctcccagcccggcttcctggtctgtgatggaaaagtaacacaactccctcaacttcagggtgtctccattggggcacgtgtttatatgtttataacctctctttctctcactgggactgacttgctctgttttgtctctacaccagctaccctaattctctgtccatcccatctgaaagtccctgtccctctgcccggggtgggcggcgtgggctctcaggggcccaaccccgccccctccatcgtcagcccatcttgtcgtctcaacagtacttcctggcctctaacactctcatttcttggtttgcttcccaggccttggctgcctggagggtcagacagtgggtgagagctgccaggagctgcgggagaagttctgggaattctacaaggtgggagcacccgccccttgcacatgtccggccccgccccctgatggccgctccgcccccgcccagctctggccccgcccctcatcccccgcctctccccgcaggcagactggtgcgtgtggcctgctgcgcagttcgtgaacttcctcttcgtgcccccccaatttcgagtcacctacatcaacggcctgacgctgggctgggacacgtacctgtcctacttgaagtaccgggtgagtgtggagggcataccaggcacccaggggactccccagggggctacacgtgtgagctccaagtggcagtgtagccagccaccctggagggtgggagtctcctgtgctcctgacaacccacacccaacagtgggctggcggagagctcctcactagcagttaagacccagccgtggctgagcgccgtggctcatgcctgtaatcccagcactttgggaggccgaagcgggtggatcgcctgaaattggagttagagagcagactgggcaatatggtgaaaccccttctctactaaaaatacaaaaaattactggtacgcacctgtaattccagttacttgagaggctgaggcaggagaattgcttgaacccaggaggcagaggctgcagtgagccaagatcatgccactgcactccagcctaggtgacagagcgagactccgtttcaaaaaaaaaagacccatgccgggcgcggtggctcacgcctgtaatcccagcactttgggaggccgaggcaggcggatcacgaggtcaggagatcgagaccgtcctggctaacatggtgaaaccctgtctctactaaaaatacaaaaaaaaaattagccgggcgtggtggcgggcgcctgtagtctcagctactccggaagctgagaccggagaatggcctgaacccgggcagcgaagcttgcagtgagccgagatcgcgccactgcactccagcctgggcgacagttcgagactccgtctcaaacaaacaaaaagacccaacccttctctgctgtctgatgtgacctcagcccggtccctgccaagtctgttgagcagggctgacctctggcccaagggcaggtagagggacagggagggatgagccaggcttctgaccagatgccttgtcttgtgtggacagagcccagttcctctgacacccccaggctgtgtggccctggacacccgagcagactgaactgtctgcttcctggaccagatgcaagactgtctcctggcggaccaccccctctgacagaaggggaatgggctcctgcagcaagctcgggtcttgagccacgtcccagcaccacttcagctccggagcattgggctgagccgccctttccaagctcacttctgggactgagtttcctcaaccggaacacacccatgaagatggatgatcatcccctagcccttctcagcaggaacctcatgcgacctgtgaccaagatgtcccatcctcagcacagggcccactctgccaaccagtctcaagcaccagcccctcaacactgccatccacctggctctgggccaagccaccaatccagagctccctcaggtcctgggactaaggcggggacatgactgatcccctcagagcaggctcaggcctggagtcggcccccaaaagtttcacatagggccaggcagcctctgtgtttctttccctggtcctgaactgtggaaatgccattaaactctctctataatgtaactgaaactgctggctgggcgcagtggctcccacctgtaatctcagcccttcccgaggctgaggtggaaggattgctcgaggccaggtgttcgagaccagcctgggcaacatagcaagaccctgtctctatttatattgaaaaataaaaataacaaaagaaaa

SEQ ID NO: 2122 - DNA, 181 bp, Homo sapiens
gggcgcggtggctcacgcctgtaatcccagcactttgggaggccgaggcgggcggatcatgaggtcaggagatcgagaccatcctggctaacacggtgaaaccctgtctctactaaaaatataaaaaattagccgggtttggtggcgggaacctgtagtcccagctactcgccaggctgag

SEQ ID NO: 2123 - DNA, 7233 bp, Homo sapiens
gatggtccattcgctttattgggtgcgtgtagtgttgtcatgacatctcctaaggaactggggggcacgtttgacactcatgaggtcagaacaggtctggtgggcggggggggggggggtcccagggtggtgaatacccacagcacacccccccaccaaaagagaaaacggggagaggagcctggcaggccagactctgatccccatggtccacacagggaaacccccaacagcggcctcggcccaccgcggcagagccgaggggctggcaggcctggccacctcccattgcccgatcagcctgctttagggtgtcatctggcccctcttcacaactgacaactgtggatgggggtgaattttaaaaaaaggcggggggggggggttcaggagggtgagcggtgagttcacggggccacgagacaccacagctgagtggggaaagggctatatgtacaggaggggcagggcttggggcgggcaggggagcctgggcccctgggggacatcttcaataaataaataaatagctacaataataaataagggtgacgggctaagtcaggagcaggggtcttgtgcccgtggctggtaggggccgggtcaggcccgggtagttgggggaaggtggggaagacagggaagaggggaaagggagtgggatggctctcagcaggcgcagtcctggtgcggtggcacctgctggtcactgagctgtgggccctgcttggcgcctgtgaccgcagggtccgccgtgtccaacgactcggacatcttctcgcagatgacatccaccaggcgctcaaaggtctgcttgacgttaatgttgtccttggcgcttgcctcaaagaactcgaaccctgtggtcagagaaggcagggatgaggaccctggccacgccctatgccaactcccagagatgcttctctgaggaaagggaacacctggagattcccagtgccaagcaacttattgaaggtactgacaaatcccacagagaagaaacttattgaaggtactgacaaatcccacagagaagcaacatggaactgggtcagctttgcatttcctgctttttttttttttttttttttttgagacagggccttgctctgctgcccaggatggagtatggtggcgtgatcatagctcactgcagtctcgacctcctgggctcaagtgatcctccacccccacctctcaaattgctgggattataggtgtgagccagcgcacctggcctcctgcccttccttcctaaaattgtgtctcgttgtccttagggacctggcaagacatgccctgcagcgtccagcccagccccgtgcactggccctggaaggctctgacactcaaatccagctgtgacctccccctgctcacacaccctctgtgactccctattgccctccaaagagtcccagcctctcagcacatggttgaggccctctgtgatcggccacatttcctccagctgaccctcatgttccagtcttgtgaaattattaccaaaacacacaggacctttctcactgcaagcctttgcccaagctatttcctctgcctgaaagacccttcttcactacccaccactccaggaagcctggctcctctcatgtgctcctcccatccaggtccctccctctacctcaggggtccctcgaggcacccctagatgcctcttgagcccagcaacacccaacaaagcgttggacggtgagtgtcagaataaatccttaaactttctgcatggcaaactcctacacatccctcaggatccaactcaaatggctcctggatgaaggctagtttgcagaaagtgtgaattacctggctttagctgtaagaccttgggtgtgtgccctcccctctcttagtgtcctttttctagacttgtgggtctccagcccagctgggcactcaccaaggtggtcagctagctgccggccacgttctgatgacaccacccgctcatcctccatgtcacacttgtttcctaccagcagcacctgggcattgtcccatgagtaggtcttgatctgggtggacctataggaggcaccaatgggggcaggtcagggcttggaggatcccagctccaccctgacgggctgatgtggagcctgtgtccttgtccgaggaagaaagacccagaagcttgcccctccatcctccccaccatcctttcccccaatgtgccccgctttcaccccactccagcccccgactgacccattattgtttctgtgttttggggttttttttgagatagagtctgggtctgttgcccaggctggagtatctgcctgccttcgcttctcaaagtactggaattacaggcatgagccacccagcccagaaattttctttttttgagatagagtcttgctctgtcgcccaggctggagtgcagtggcgcgatctaggctcactgcaatctccgcctcccaggttgaagtgattctcctgcctcagcctcctaagtagctgggactataggcatgagccaccatgcctggtaattttttgtgcttttagtagagacagggtttcactatgttggccacgatggactcgaactcctgagctcaagatctacccacctcggcctcccaaggtgctgggattataggcatgagccactgtgcccaacccagaaatttttttttaaagttattacttctgagcagaaaattgaaatgtttacaatctctaacctatgccaactctccttttttttttgagacagagttttgctcttgttgcccaggctggagtgcaatggcaatcttggctcactgcaacctccacctcccgggttcgagcgattctcctgcctcaggctcccaagtagctgggattacaggtgtgcgccaccacgtctggctaatttttgcattcttagtagagatggggtttctccatcttggtcaggctggtctcgaactcccgacctcaggtgatccacctgcctcagcctcccaaagtgctgggattataggtgtgagccaccgtgcccggccatgccaactctccttatagtctctatattctccaccctacacttgcagatatttgtttctatatggttatagttttacttttccatctgaaatccttctctgacccctacgttttatttattattttttgaagaaagtttggctcagagacaatggccccagaatgagtgtggaaggccagaagcgatggctcacgcctgtaatcccagcactttgggaggccaaggtgggcagatcacttgagccaaggagttcaagaccagcctgggcaacatgaggaaaccccatctcaactaaaaatacaaaaaaattagccaggtgtggtggtatatgcctgtagtcccagctacttgggaggctgaggcaggaggatcacttgagcccaggaggtcgaggctgcagtgagccctgatcgtgccactgcactccagcctgggtgacagaataaaaccctctctcaaagaaaagaaaagaaaaaaaaagagcaagtggggtacactcaccagtcctgcactgcattgaaggattcctcgttggtgatgtcatacatgaggatgaagcccatagcgccccggtagtatgcggtggtgatggtccggtaccgctcttgccctgctgtgtcctagggaggaagagatgaaggtcagagaggacctgcacataaggccctcgaagaggaaatgagctctgatatcatccagttcagccccctgggagaagcaggagcttgcccaggggcacaaagtgtcaggaagagcaggttgggtcaccagtgctcagaatatatgagtgctccattattccacagagtcattcaccaaacgtactgtgccaggtgctgtggctcacacctgtaatcccagcactatgggaggctgaggtgggcaggtggcttgaacccaggagttccagaccagcctgagcaacatagcaagaccccatctctacaaaaagtacaaaaattaacagggtgtggtggctcacacctgtagtcccaactactcaggaggctcaggtgagagggttgcttgagcccaggaggcagaggttgcagtgaggtgagatcgcgccactgcagttcagcctgggtgacagagtgaaaccctgtctcaaaaaacaaacagggggtcgggtgtggtggtggctcacgcctgtaatcccagcactttgggaggccaaggcaggtggatcacctgaggtcaggagttcgagaccagcctggccaacatggtgaaactctgtctctactaaaaatacaaaaattagctcggcgtggtggcatgcacctgtaatcccagctactcaggaggctgaggcaggagaatcgcttgaactcaggagacagaggttgcagtgagccgagatcgcgccattgcactccaccctgggtgacaagagcgagactccgtctcaaaacaataacaacaaaaaaaaaaaaaaaaagaaagaaagaaagaaagaaagaaagaaaacagaggccaggcgtggtggctcatgcttgtaatcccagcaccttgggaggccaagacaggtggatcacttgtggtcaggagttcaagactagcctggccaacatggcgaaaccctatctctactaaaaatacaaaaaaaaattagctgggcttggtggtgagcccctgtaatcccagctactcaggaggctgaggcaggagaatcgcttgaacccgggaggcagaggtttcagtgagccaagattgcactactgcactccagcctgggtgacagagcaaaaactctgtctcaaaaaacaaacaaacaaataaacaaacatggactgggcactgatcttttccacaccctgaactggacactggggacacagttgttaacaagatgggcacttcccttgctaagtgacactcagtgtgggaaatagaaaataacggtataaatgtatcctatattggagagtgacaaggaccaaggagaaaaatcaagccagatgaagatggagagaatttaactgtaggtttaaaaattaaaggaagctgacacttgcctgtactcccagctacttgggaagctgaggcgggaggattgcttgagcccacgagttcaaatccagcctgggcaacagagtgagactctgtctcttaaaactaacaaggccaggtggggtggctcatgcctgtaatcttagcactttgagaggctgaggtgggaggatcgcttgagcccaggagttcaagaccagcctgggcagacatagcccgaccctgtctctacaaaaaagaaaaaaatcagcaggcgtggtggtagaagcccgtggtcctagctactcaggaggctcaggtggaagaatggtttgagcctgggaagtcgaggctgcagagagccgtgatcacgtaactgcattccagcctaggggacagagcaagaccaccctgtctcaaaaaacaaacaaaaaaagagaatggggaccaagatccagctgaaacctcatacatggaagaacttgaagatggggaaactgagggaccaggattaggtgcttatgggagaacacaggtgctgtttctgccccggtacacagtgggcaccttactgataaatgcccagtgtgtaagtgaatgactccagtcaggaaagagatagacgaggttggggctgcttttccaagtacgggaatccaaccgagccgggcgggagccctccagctgggacccacccagatctgcagcttgatcctcttgtcgttgcgatagatggtcttgaccttgaagtcgatgcccacggtgctgacgaaggcaggcgtgaacgagtcgtcagcatagcggaagaggaaggacgtcttgcccacgctgctgttgccgatgatgagaatcttgaacatgtagtcgaagttctgatccgaggactccttctgcccatagcgcgagtctgtggcggatgccatctggggataccgggtgtagcagagccgtgaggggggctctctccatcctcatgtgcccaagcccaggcagaagatggcaagggctccagaaaacggccggtgtatggaggacacccttatcccatcaggagccccagtattaattggtggtgcccccagcagagggcagcctgtgaccttgaaatcctgggcgtttcagaggaggggctcagagggttgccgatggggacaccccagcagcccccttcaaggggcaggtgccccaggtggggctgtaaccctaaacccagggctgagcccggagggggtgactgcggctggctccgccccccatcaatctttcatggtcctcagaacccggccgcgcggccccacgtgcaccgcgtgcatggtccctcgaggacgcgcatctgcagcccccgctccccgcaaacctccaggccggagagctccggccaaggccgctgcatcacatgatacaggaggggcatgcacacgctcacgtgcacacagcctcaaacacgctcatccgtacatacaggagtgtgtgaacgcactgaggtgcacaggacaaagacacagacacctgtttgcacaccgactcgcctatagaaatgtgcaaaccacccgtgcgcacaggcccctccacccatgcaggcgtgtgcacatcacccacacggacacggatccccgtgcttgtatgcacgggccatacctgcacaggcggtccacacgtctttctccacgcgcgtgcaacgctcacacacttaggcccagacccccacggcgtcacacgagcatatccaggtacacaagcaagggtgcacacagacccgctgacacaggcaggcgcgcacacgcgtgtgcacaccacgcgcacgcgcacgcaaaagcctcccgcgcgcacagcttcccgcaaggagctcggctcccctccccctccgccgcagagcaggggggttgggggggttagtggtgaggatcaggcaggagtggggcgcccgggccctacccattcccagcctcgcgaccgccgcatccttccccccattcaaccctagtcaacctcgtcccccacctccatcagcccatcagtcaaatgaaggttatgcaggtgctcggagcctgagcacacccggccgcccaggagctcaccttgccctgcaccgatgcaacggcgaccctagcggcggtgacttttttggcggtggcggtgacaggaccccggtgcgttgatgtggggctgcgcggcggcggcggcagcagcggctcaggcccctgcagtcctccgtg

SEQ ID NO: 2124 - DNA, 11881 bp, Homo sapiens
gctgccactctcactgccagaccatgccatcaactgcgtgcgcatgggcctggacatgtgccgggccatcaggtcagctcaggcggtggtcaagaggaatgctgagggtggatgtggggggcagcaggcagctgacagaagtcctctttgtgagaatctggggtgtctcacaggcagggctgagggtaggactcagattgtcccacacacacactgctcaggaaactgcgggcagccactggcgtggacatcaacatgcgtgtgggcgtgcactcaggcagcgtactgtgtggagtcatcgggctgcagaagtggcagtacgacgtttggtcacatgatgtcacactggctaaccacatggaggcaggcggtgtaccagggtgagacctagggccctaggcagctacagcagaaggccaaccaggcctaccacaggctgccatcctttcattagttccttaagataagcacaagatgagtaccttaagataagtcccatatggggcttgggagatcctagggtgcagggaggggagctgggaggcacctcctgtaacacaggctctttcttgaagtcagacatccaggaacgatctttaaaagacatgagatgtttgtcagttctaggagccatgggggtgatggggcaggaaataggagatttgaaggccctccctgctgacccctactgcctccctccttccaggcgagtgcacatcacaggggctaccctggccctgctggcaggggcttatgctgtggaggacgcaggcatggagcatcgggacccctaccttcgggagctaggggagcctacctatctggtcatcgatccacgggtaaaagcccagcccagaccccatgggctggcctacacaaaccaccccacagccaacaggcctgatctcttctgtgccagagattgagttcctgggtcctagtggggggtggagggagaaggaggaagtgtctgtggtctttactgtcagcccttatgtgccccaggcagaggaggaggatgagaagggcactgcaggaggcttgctgtcctcgcttgagggcctcaagatgcgtccatcactgctgatgacccgttacctggagtcctggggcgcagccaagccttttgcccacctgagccacggagacagccctgtgtccacctccacccctctcccggtatgtgcaccttcatcctgagccccagagcttagttaaatccacccccagtatcctcaggccccactggcagccttccctgcccccaccaccagtgagccacttaatgatttgtgacatcccaaagtcccgaactgtcttgtcaccccagtcactggttcaggcccttccttgcccctccttctagagaaagagccctccagctcacctcagagaagatacaagatccctacagacaccattgtagggaccagccccacagggtcggtgggtctctccctgtgtgcgacgacgagagagtgtagaaataaagacacaagacaaagagataagagaaaaggcagctgggcccgggggaccactaccaccaatgcgcggagaccggtagtggccccgaatgtcgggctgcgctgttatttattggatacaaggcagaaggggcaaggtaaagaatgtgagtcacctccaatgataggtaaggtcatgtgggtcacatatccactggacagggggcccttccctgcctggcagccgaggcagagagggagaggagacaaagagaaagacagcttacaccattatttctgcatatcagggactattagtattttcactaatttactactgctatctggaaggcagagccaggtgtacaggatggaacatgaaggtggactaggagcgtgaccactgaagcacagcatcacagggagacggttaggcctccggataactgtgggtgagcctgactgatgtcagggcctccacaagaggtggaggagcagagtcttctctaaactcccccagggaaagggagacccccccccccaccccgctttcccggtctgctaagtagctggtgttgtttcttgacaccttttgctaccgctggaccatgatccgcttggtgacgggcgtcttcccagatgctggcgtcaccgctagaccaaggagccctctggtggccctgtccaggcataacagaaggctcgcactcctgtcttctggtcacttctcactatgtcccctcagctcctatctctgtatggcctggtttttcctaggctatgattattgagtgaggattatcataatattggaataaaaagtaattgctacccactaatgattaatgatactcatatataatcatatctaagatctatatctggtataacaattcttgttttatattttattatactggaactgctcgtgtcctctgtctcttgcctcggtgcctgggtggcttgccacccacacaccatgtccataactccccagcctctactcaggagagtgccttcccctgacaccacaaaggcagttggaccccccacttcctcctgtctctgattctagggctgtgcacccatagcaccaggaaatgtctctgtttaactcaattcctgaaactgcatgctctcttcttcaaccccccaacactggggagtgggggaaggacactggcagcagtggttgcaggaagtacttaattccaagtgttaacatgaggtaggggagaggtcagagggttaagctggcaggaggaagaggaaggaagaagctgaggttcagctgactgttgcaggatgagacctccagcatgggtggagtggtgtgtggggactgctacaagcccagggactgtgagatggtgttaggtacaattacatagcaggaatgcctgccggggcccatgctagacctcctgccgctttccactggtgtgcaggctagggagtattagggtggaagagcaggaccctttgttcaagggtgtctcctgaggcaggaccttcactagcacagaaatccacttagcccctgaagttccaggggctcagtcaaatattagaaatcttgccaggcacggtggctcacacctgtaatcccagtactttgggaggatgaggcagatggatagcttgaggtcagtagtttgagaccagcccggccaacatggcgaaaccccatctctactaaaaatacaaaaatcagccaggcgtggtggtgcgtgcctgcaatcccagctactcaggaggctgaggcaagagaattgcttgaacctggaaggcggaggttgcagtgagctgagattgcaccaatgcactccagcctgggcaacaagagcgaaactccgttgcaaaaaaaaaaaaaaaaatccagccaggtacggtggctcatgcctataatcccagcactttgagaagccgaggcaggcggatcacctaaggtcagcagtttgagaccagcctgaccaacatggtgaaaccccatctctactaaaaatgcaaaaattagctgggcgtggtggcacatgcctgtaatcccagccacctggaaggctgaggcaggaaaatcggttgaacctgggaggtggaagttgtggtgagccgagatcatgccattgcactccagcctggtgacagagcaagattcagtcacacacacacacacacacacacacacacacacacacacacacaaagatcctgggagtctagagagtcagggggaaactttaaggagattcaaacctccccttcaagggcaggtgggatttgggagacagagaggtcattagaggcaaaagaaagagcccagtgaaatgcccaaggtcaaagacatgtatagagcatgcagtgtggctcatggtctacctcactgcagggaaaacacccaccatgcccacctccccctgtgctctcccaacaggagaagaccctggcttccttcagcacccagtggagcctggatcggtgaggaggcctcaaagtctttgccagtggggctgtctggatgaccccctccatcctccctgggggtctgctcctgctttgcccagacgctctgagggtctctgtggtgatggacttggctctcactgtgcaggagccgtaccccccggggactagatgatgaactggacaccggggatgccaagttcttccaggtcattgagcagctcaactcgcagaagtacggagaacaaagagggctgggggggccgcaggccctgaggtcatatggtggagaagggatggtgctccctgaggggctggagggaagactcgcctgaccaccccctcttgccctcactctgccctcttcctgcccttctgtgccctctgttctctggtgctttcacccaccctcccacctcccaccagacagtggaagcagtcgaaggacttcaacccactgacactgtacttcagagagaaggagatggagaaagaggtgggctgtggtgtgggtggcaccaaacaacttcccaactttagttccttggtgctggggaggggtcagcccttgggtctcctccccaagtctgctcagtttgtgatcctaggggtgaggagcttgtgcctctctctaaaggaaagtcactctgtagactgagctactagatggtagggggaggaaggagggtaactccttggagaactggtagggtctacatggaactgaactggagcctgggcggtgaggctgaggagcccaccccttgcctgggagtgatgccttcaaggtgatgggtagcactggaccctgtctccacctctggccctctcactttcagtaccgactctctgcaatccccgccttcaaatactatgaagcctgcaccttcctggtttttctctccaacttcatcatccagatgctagtgacaaacaggtgagagtgccccaggcaaaggaggccctggctgtcataagcggatcaccttgccctcatgaccccgggccacactttcttccttcaccccttccccttagcttcaggcacttacccacagaggaaacatgtgttctggggaaaatgataatcacggcccttatcttaaccttgtagatcctgtggactttctacacagccctagcattttcccatgagcatctcttttgattctaacaacatccccatgaaggccagtttgtttccattgagaaacccaaatctggcagcaaatgcatgagcttagaaagtaggccctcattcctagtccactgctaggagggatgaggacttgttcttaactcagccaggtggccgggtgtgatggctcacgcctgtaatcccagcactctgggaggctgaggcaggtggatcacctgaggtcaggagtgaaagactagcctggccaacatggtgaaaccccatctctactaaaaatacaaaaatttgctgggtgagatggcaggcgcctgtaatcccagctactcgggaggctgaggcaggagaatcgctcaaacccgggaggcggagtttgcagtgagccaagatcacaccactgcactccagccagggcaacagagcgagactccgcctcaaaaaaaaagaaaaaaaaaaaactcagccaagttaaagagctttgggctaaaggcccagagatcagtctgccgtagcctcagccattcttgtgagcccccactccccaccatatgggtccctgttccacctcgacactgctctagacccttaagccagccaacccagatcatcagaatgcaatgtcttctatcagccgggaccccatcgccagccaacccagattccccagaaccacttcccctatctcccacccagctcacacagcaccttcatagcacacagggagcctgttctggcacttcaaggcctcgcttttgtctcccttcaggcccccagctctggccatcacgtatagcatcaccttcctcctcttcctcctcatcctttttgtctgcttctcagaggacctgatggtgaggtgggctgaggggtggaagtggtatgccggagccctggtcacaacctgtcctgaagagggtgccccagccccgtggctaagatgcccatgctccctccacagaggtgtgtcctgaaaggccccaagatgctgcactggctgcctgcactgtctggcctggtggccacacgaccaggactgagaatagccttgggcaccgccaccatcctccttgtctttgccatggccattaccagcctggtgaggacagagggggccctatccacccccatgagggcatgttggacctgccagggactgaaagggaacccctggatttgggcaggcagctggactaagcccaggggatgctggaaatgttgtacaaatagaaagaaaaaaattacagtctccagcaatctaccatctgggcataatagttgttgataacacttcggtgaatgtccttcttatcttttttctgtgtaggcagttacttattacttagatcacttggctgattcttcaggatttagactcattcctagaattctattcctggtgggcacctgggaatcacccaccagccaagttacagaagaagaaactaaggcccagagaggctaagtggctggcaagagctcacacagtggctcagagtcagaggagtactcttgacgcccctcacataactcctccccgagtgaggaccccagtgctgaggttcccttcccaaccagaaatagcaggatccacccctttggacgagtcttcccctgactcatccctgggtcagctgaaacccagcacaagccaccactgtgcccaagaagctacctgcctcttcaactcctcatctcctctgcagttcttcttcccaacatcatcagactgccctttccaagctcccaatgtgtcctccatgatttccaacctctcctgggagctccctgggtctctgcctctcatcagtgtcccagtgagtgttcccacatgcccttaatctccttctgcacacccttcctcagcccaagcccacagccccctgagtggaggaacgctccattctgtggattagaacagacataagtcacacccagtgtgtatcagtgtgtatgatgccccctgtctcccagataggacctgggcctgggagggacaggaagggagccctcaggtgtcccccctctgcctatgggacatgcccactcctgacccctgcctggccccacagtactccatgcactgctgcacgctgggcttcctctcctgctccctctttctgcacatgagcttcgagctgaagctgctgctgctcctgctgtggctggcggcatcctgctccctcttcctgcactcccatgcctggctgtcggaatgcctcatcgtccgcctctatctgggccccttggactccaggtgtgcacagctgctggacagaggtgccgggccccctgggatggggtgagatgggatacagcagagctgtcctggcctcaccgacctgaatcacccacagggcaaagtgggagggaagcggaggcctacatgggggcagggagaaggccaggaagggggaaagcaaggggtcaccctgatccatggccccttcaggcccggagtgctgaaggagcccaaactgatgggtgctatctccttcttcatcttcttcttcaccctccttgtcctggctcgccaggtaagtcacccagctcagccccaccagggcccacctatgagtggcccccatatctgtgacttgatctttctaatctccagggttgaatgcccattggaagcttctaagcgagccttcctgcttcctttcttctccttcactccctgcccctcctttctcccacacccctatctgggaaagcccatgctttagaaaaagtctgctgccaattctctatccctagtctgaatctaatttcaaggatagtctctctccaagtatacttacaccttaagctctacttctaaactgggggtggggtgggggtggtttcaggcatcatggagttggggctgaacactcaggagctgggcttcccctgctctgtgtctccccatggccccgggtgaccctccccagaatgagtactactgccgcctggacttcctgtggaagaagaagctgaggcaggagagggaggagacagagacgatggagaacctgactcggctgctcttggagaacgtgctccctgcacacgtggccccccagttcattggccagaaccggcgcaacgaggtgactcctgaccccctgactcctgagccacggatgccatagggcctaatttcagatgaaagccttgacctatggcccgttttctctagaacccccagaagggtcacccaagcccttgtgcttgtcaagcgtctttgttttcacaacatcttagattctttctttggtgagcacaaaactgcatttcaaattcttacttggaaggcatgtcttctctaactcatgaccattccatacattccagaagcctaggcgttgatgggagctgtctggagcaggggtccccagcccccaggccgcagactgatactagtccatgacctgttgggaactgggctacacagcaggaggtgagcggtgagccagcactaccgcctgagctctgcctcttgtcagatcagtagcagcatcagattctcataggaacttgaaccttattgtgaactgcacatgcaaggggtctaggttgtacactccttatgaaaatctattaggctggtgcaaaattaatcgcagtttttgccattaaaagtaatataattaaaagtaattacttttttttttttttaagacacagtttcactctcatcgctcaggctggagtgcaacagagtttcactctcgtcgctcaggctggagtgcaacagagtttcactctcgtcgctcaggctggagtgcatgtaatggcacggtctcagctcactgaaacctccgcctcctgggttcaagcaattctcctgcctcagcctcccaggtagctgggattacaggcgcctgccaccatgcctggctaattttttttatattttttttttttagtagagacagggtttcaccatgttggtcaggctgatctcgatctcctgatctcaggtgatccacccaccttggcctcccaaaatgctgagattacaggcgcaccgcacccggcctaaaagtaattacttttaatggcaaaaaaaaaaaaaaaaaagaaatgcaattaattttgcaccaacctaataactaatgcctgatgatctgaagtagaacagtttcatcccaaaaccatcccccaccacagcctgggtgcgtggaaaacttgtcttccatgaaacccatccttgggtccaaaaaggttggggactgctggtctagaggatacagtccacccctctctctagacctgcactatccaatatggtagccattagccatatgaaattttaatgttaattaattaaaataaaatattcagttcctcagttgcaccagccacatttccagggctcaacagccactcgtagctagtggccaccctattggacactgcacatagggaatgtttccattgcaaaaatttctattggatgctgctgctctagatcctcaaaaatcttgctagcgccaaaccatcagaaattcacccacatatttgtaccatcttatttgtatcatctgctggccctctgctgtggaaatgctcttggctcatattgagggatgttaaaagaaacagctcaggagctctttcacagccttatgcccccaccgcctgctccctgctctcaagatcagtagttcttttctggtttcttctcttacagacacaaggaatcttgtaatcgatccttttctctcttcactttggctgctagaaagctgagagccaaaatctaagactaaataggatttcatggcactcattttgtgaaccaccctcagatctgattccatctttattatcttacccttattttccctttgcctcatagtccctattgttgcttacttcatctttcattttgtacctatcttaactgacttaaacacttaaacacattttacccttggttttgtagccggcttaattgacttaaacacctttcagcaataagataggatatagaaataattcacattgacaggatcccagttctaggagtgactcccttcgtgttgctgtgaggtgatcctaacgccaaacctctgtctcttctagaattacaatgagatctaagctttgactcctaagtcacttccctggggtagcctggccctactcctctccctccttcccaattcttcttaaacagggagaccaggagtgtggacatggggaggagggccccacgcagacctctagaagggagaggaacatgacacacacccctcactccagtctcctgttcccccaggatctctaccaccagtcctatgaatgcgtttgtgtcctcttcgcctcagtcccagacttcaaggagttctactctgaatccaacatcaatcatgagggcctagagtgtctgaggctgctcaatgagataattgctgattttgatgaggtgaaaattccaagagtctcccagaccctatgtcctagattctagaattttccaccagtacctccttccactttgcttttctggccatgaagtcaatcctcccctccacagtactccctcacctcctctgatcccccagatctacccactccagcaacactgcccaccaccaaccctctccttcctgacactatctccactcccacagcctgatcctttaactccaaaggcttggggctgggcttctgggagaggtgatggagagagtaagagagactggggacaggactcttctctatatacagctgctctccaagcccaagttcagtggggtggagaagatcaagaccatcggcagcacctacatggcagccacaggcttaaatgccacctctggacaggatgcacaacaggtacggcaacccttccttacctaccatcctcctctgggctctcattgatgggcttattagtgggacttattcctgtgccctcactggcccaccctggtgggcgggcccattgccaggatgctgaacggagctgcagccaccttggcactatggtggaatttgccgtggccctggggtctaagctggacgtcatcaacaagcattcattcaacaacttccgcctgcgagtgggtgagagacttcccctgctgcagcagtctggtacctcctcaccttcctgagcttgccccactccaagtcctttgttagctgctcccagttcatcctgaagcccctttcctgactcactccctgggatggggtgtgaaggtgctgggcaaggaggtacgaggctctcccactctttttcttaagctacattcctccagcccttagagacccctcctctcctctagggccccccaggctcttctcccttccttccagttccttgtggcttcctcttcccctcttccttctccaagtctgtcattaccacatccctcattagggttgaaccatggacccgtagtagctggagttattggggcccagaagccgcaatatgacatttggggcaacacagtgaacgtggccagccgcatggagagtacaggagtccttggcaaaatccaagtgagggaaccacattggaggcatagggggagggggactaagaatagggccacctccatattccctcgcccccctccaattgtaggtgactgaggagacagcatgggccctacagtccctgggctacacctgctacagccggggtgtcatcaaggtgaaaggcaaagggcagctctgcacctacttcctgaacacagacttgacacgaactggacctccttcagctaccctaggctgagattgcactcgccttctaagaacctcaataaagagactctggggtgtctggagccca

SEQ ID NO: 2125 - DNA, 262 bp, Homo sapiens
ctgaagctgctgatatagctggggatcaccttctcattgcccttcagtgggaattcttcttcttcccaggccaattttagtgcgagtgtgtgtgtgaatgtgtgtgcacatgcctgcacacatgcatgcatgtgagactaagcattttgaaagggagtgatttttttcacaagctcaggaagagaactccctcagcctctctgccaacttgattatagtattttgtacaccttggaagcataaagaatttagccacatgact

SEQ ID NO: 2126 - DNA, 9664 bp, Homo sapiens
caggagacccagcagtgggcaagaccgccctggcacagatcttccgcagtgatggagcccatttccagaaaagctacaccctggtgagctggggtgtcaagacctggccacagcttatagagaagtgctcggttcaccatgatgagtgacttcgaagttccttgagggaagccttaagacagctgatgaaaggctgctcagagggccacgtggagatcgttttttccactagcccagggtgagaggttggctacagagcagaatggccacaagcaacttggccaccacgtgtagcagctcacatcagggcagggaggtggagaggactagttggtcccctctgacttctgcatgctgagctgcttctcacaagaatgagtccagaacaaacccttccactggagatagccctcctgggatcggggtgcttgtgtgtcctcctgtaacatgctctccctttgggggccctcagtgctaacattcttggtgttcctcggcagacaacaggaatggatttggtggtgaagacagtgccagttcctgacacgggagacagtgtggtgagtgatgcctttacccaggggaactcagggctcccccagctgggcccagggtctctgtggtcacaccatcctccctaggagagatgcagtgcaaggctgtggtctagacttggctgagcatttcggaatagaatcgggaagcattcaagggagggactgaggaggtggaggaggaaggaaggaaggaggactaggagatgggcctggcccttgaggaacttgttctctactatcaaggttcttgagtctctttatgggaacctggggctcttgaaagtgaattgcaagacgttatgtttgtgtgtgcttttctagagagagggtttgtagctttcaccagattcctaaagaggtctgcgagaaaaaaaaaaaaagtataagtacttctgatgaagagaaaggtgagttcccaggtaaccaatatgcaaaacagacaatggtgctgatgtttagacggtgtatgccagggatcagaggccagccaggaaatacccagtgccaggagggagcttgtgggggagccgaggggtgatttcctaggggaccagccctgggggttctcacatgggctggggaaggtttggacagggcaggaagggtcatcccgcaccctctgtctgcctcacaccttagccatcccagaagggtgacagaatgtcctactttaaacaccttccccaggcctactcagtgacctcctttagaaagaattgttctaagatttgaaaatcaatttggttaacaaagtgcagaatgaccttttggaaaccagagcactcaccggcctgtttagcattctgttctgccaggtgggaagtcagcttgttcctggtatttttgcactcagggttacaagaggtgagactccacacagaaagtgctggttggtgcgagaacccgtcgtactgcctctctaagactctggagttcgctcctttccccttcatcttctctcgtgcctgggagaaaagacagagcatgtgtgaagatgtgggtgcctgtatttcacccctaagacaagtccagtgtgagttgagagtgataccagtgactcgtagcttgtggtttttccacgtggagacttttcttgcttttctgattgtaggaactcttcatttttgactctgctggcaaggagctgttttcggaaatgctggataaattggcaagtagcacgtggtctttttcctgactgtcaccacctcctgccaaaacgtttacccctgacagtgctcacacagcagtttccctgcactgtgctgttgggaagctcccatggcattactctttaaggggcattcctcccagcccaggactcatggatacttggcaagaaggagtggctgatgcgtgtgactgcccgggccccagctctggggtgcccaggatccaatgggccaagagccctgcggctcggtccttgcagccctccccctgtgaggcctcccttctttagagcaacactgtcctttcagatggtgtcccctacctcccaagacagtacagactgcctcctccccctctgggaagtgctgtagaggcctcagcctataacgaggctcactttctgccgttccactggggtttgctctggaacatgcccctgctgctgcccaggcctcaccatgccccatccacccccgtcccaccagcctcgcaggatccacttgctgtaccttccacggtaacagtctcactaatctgggccagtgagctaattagaaggtttgagttctccagagccctcccctgcctttccaagaacagccacattttaatgggaacagttttctgcccctttttttttgttgcctaagagaagtagatctaatgatagtgatttcatacagggttggcttcatgcatcggttcacgacgttcaccccaattgcctaccgtgtgcatggcctggcactggggctgccatgcccagcagaagggaagatgtattagggcaaatccaggccatgtgccacccgtcagctcacaccctcccctccagccggccctgactcctggttcacccgctctggctttagcttgatgccaggcctctccaggaccccctcactgaagcctggaagaaggaggatttcttgagttaaaaccacgctgaagtgtctcctgcgtgcatgtaacagagctcaatgtgttctagcaggagttcaagagttaatctgtggagtgaagggttcatcagtttagtccacggtcctcccatccctgacactgccagaagccagcacagccttgtagggtgaggaggagccctccagagtggaatctgggcccgccttccaaggatctgaaagggaatccaatctggagggaaaaggattctcttctgtaccctgggaggttactggcaccccggaaataaaccaggtcctaattgtgcgaggttgggggatccagaaaccagagcatggccaagagtcacgagcaccagggtgcgcacccacagcctgtacagggccattctacatccaggggcaggcagcaggacatcccaggactctgagcagcccctgaaggcgacagcccctgagagtgtagccttggctcttaattgggtcatggagccctgtccagttgtcagtgtggtttggattaggctgatgcagagatggcaagagaagcagaaagtgccctctgcattttaacaagccagcccttattaagaagatgcaagcaaacaagcttcccaggctggctaatgaagaaagaatcttctttcagggctgcaaagcacaaaaatgtaacttgcatggtggtgggctcttgataagaatgagtggagaatgaatgaatgaggccagctgcaggtgaaagcagattgttgggtagagaagaactcagtcgtcccccatctctgtcatcgttgtctttgtttttaaagcctgtcaggcctggacaagtcacttaccctccctgaatttggtttcttcagctacaaagtggaaatattcagacactctaccgagttgggaggtttcacagtgaggcacggaagtgcccagcagagcctggcccagacatgagctcttgtccttggcggcaccgccccagccctgcctcctgccactgaacgtggccctccgttcattcctttggggaaattgttggacatctgggggtgtggctgttttcgtttcttgtttccctctgctccccataccctttcccttggaaggccaaattgtctcccagccttgaagtcacttttcctgttactgacccatactcatcctgtccctcttgcacagtgggagagtcccaatgtcttatgtctcgtctatgatgtgaccaatgaagaatccttcaacaactgcagcaagtggctggagaaggctcggtcacaggctccaggcatctctctcccaggtacgggctgcagacacccatgtttcccagcggcatctctgtcctttggttcaagagcacaagggcattgcagaggtagctgtgggtggagaaggggccctgggcttggactttgatggcctaaggcgtacactggccctgccacttagcagccatgccaacctcggtgagtcaccacacacacctctcccagtctaggaaacgggaatgaagacacgcacctggcagggctgtggggagactcaataacgggagggtgctgtaatatcagttgttaattccagaaagctaaccccagggaagagttcctaattttctcttgtatatggggtacaagtaaacattcaagcctgttgtcacttctgaatgctttaaatcagtttatttttcgtccctatgtgagatcaacaaattctcctcattatagaccggggaaagtgatctccagagacaggctcaaaaattagctgcagctgatgcagctgggagctgaactaaattacctctgaatccctgactccgagccgagtccttagattactattaatgaccagtttacagtttgctccgtgtgctcagaattattacaaaggctcacataaatttggccctcgccttcaggcgtttgcagccctttaaggaggcaagggagacagatacacgtgaggtctagaaaaagacctagcagaagttgtgcatgaaaagcgaagcccacctgtctctctgtggcccttggggccatcacgagagacccccggctttccctgtgggggggctcaccacctcgagtcaggcagctctcagaggatgctttacacccctcaaaaatagtgctctcatctcgcccgctgtccttccagagtgtgacagtgaagtgccatattttggttgtttcttctgagtaggtgttttagttgggaacaagacagacctggccggcagacgagcagtggactcagctgaggcccgggcatgggcgctgggccagggcctggaatgttttgaaacatccgtggtgagtatttccacttgcctcgtcgccaagtctggagtgggcctctgctggcagcggtcttgcacatgacctcacgtgcagggagctgttattccaccatatgcagagtctcatttggaactgatgtttacattcttacccgagatctcttctcagtatagcagtagctgctcagacataacaggaaagcagatcagccagccaaccctgggaaaaggtgtatctcaactagtaagaaatacaagtgctttgtgtgcggtgatcatgaccctcgacgtttgcatgcaatattctgggttcagatgttgttggaacattgtttcatgtggctctcacaaccagtcctgtgaaccagaagttggccccacagctcccattccagtgttgaggagctcaagtgacttgtccaaggtcccatgattagcgaagggtggagccaggattaggactcatggcctctaattcccatcggtaccacccatcctcaccttgctgcagccccagggtgactccaggccacaaagtgcctgccagttaaaagagcagaagacctcattacaaaaagcaagtgattttcagcgtcttcagtacacttttcctggcaaaaactgcaattacttttgcaccaacctaatgtatcatgattttagctgtccagcactgaggaacctgcttcctgtgtttgggagttttaaagtcccatcctccttgaggccaagatgcagccatgtgacccaggctgcaccaatcagacccctcacatgagactccactaggaagggcatgaagtgatgatctgccctctaggaacaggtgtggccctgaacatccatctcagagccagcaggggcccgagtgttggttgccctgcccctcgccagggttgctagctggggagatcaccaggcctggcacagtcatggtcgtaacttggacctcaccttgtggcctttagacctgattctgtggccctcagaattgagtcatgggctggttaatgttctggaggtcatcttctgctccagcttgactttggctctaggcacttctgctattgcatctaggaaccttgaccagtgctgccgtccgagcttataaaactcccccaaagcagcatgcttccttagggaaagtacagcagtaaaggcaggcactctgacctcccatggtgagtggcagaactcgccgtgggaacctggacatgttatttcacctgttggtggctcaggcttgtaaagtgaggatcataaaatacatcccttatcgagtaataaatatgagaatcaagtaatatgtcgcatataaaacatggatcacagagtctggcgcctggtaaacactcagtagatgttagctttcttaaagtataaatattacccctagaatcttgtttatactgttattacttactaaatccttgtattcatggcttgtgcagagataaatatcacccttgcctctggtccaattatcacaaatgctaaattaatgaagcccaaatcagcttttcctgtatagagggtttgccatcttttctgcagcacacctttgtgcaaagcagtaggcggtagtgccctagcaaacaggatttcagtattctcccttcctccattcatttgtgaaattgtccctgcaccccaatattccatattccctagaacgcttgatagaactcagaaattaaaacccaccccaacctccaaaacaggagtcaccaaaggccagtgggctacgggttaaactctgttgaggtgttgaagtgggtgggtgggtgtgaactactcttgaagaggctgcagtaagcacttgctattatctgtgcaagttaactagtcccccctgagttgaggctcacagaagcaccgctggcagctcggttaagaaagctgtaattaaaaaggaaatataagcaaacgcagcttgagacgcagccaagggctggcgccaagctcatctcctcctctcttctgcctaaacaccgcagtgaccatcctgcctacccaaaggaggtccctacaaacaagtgcaagaacaatccgcgctgatcactgccctcccaggcaagcgaggagtggggaagtaacgtttgatgagggcctactgtgtgctaggtgttttgcacacattatttgtttaggcttcataacagccctacaaggtaacactcctgtgttgtatagatgacagactcagaaaggttgtgtagcttgccctggttgcatagttaaacgagggctagaaacaggactaggagtcaggcctgtccagctggaaaacttgggttttctagaaggggtaccctggcctcctgcggagcctgctgtgggactctgcagaacacaattcaaggccagactgaacactagcctgaacctgccctgagaatccctctaagccgacctactccacagctgtcctgactgtgtaagcgagatgatgattagtgatcagacgaaaggattcctgtcattggtaaccctctcaaagtatttggaaaacagttcaattttcatctatttcagaagcacgccgtggtgtctattgaggctcacctgcattgaattccttcctttttatgttgcgatctcccaagattgcattgtggagtgttttcgaatccattttgaaatccccgtgcgtgcgctatgcaggcctcagtctttttccattccattcttaactctactttcgacggaagcagtgttttaccccgacactggcttgcctaggaccttgtgctctgcacaactagcagggcccggcaggatgtactgaattcttgctctcgtgtccagctggacggtgatggctttcaagtccttggctgttgggagcttactataaatgttcgtcttggctacaaactctccactctttcctcggcactctctcagcattgccaccactgtctttcctcttggccaactgttttctttacttaggctttcccttgctagaaagtccaggtaactttctccacgggacctggtttccttcgcacatcccagctggcctcgaggaaaggtagctcttcccaaatcagagaatctggatgctgggctgggctctgcaccaaccagctgggccgcttcacccgctgggccccaaactactcatctgtgaagcgaaggcaccgcgcttgatgccttctgcaacgttcttcagtttggaaatccttctgtttcgttggggatatttcacggcctcttctcaaggttgcacttttgccagctgccagggatcgtctcaaaacaggttcttagtgcattcatagcttgagctgctgtcttgaaagtagtacattcctttttctgccaacttttttctgagaaagtttttgaatgcacacgtgcacccaacagagtgagagtggctgttaagagagagggcgccatttcctttgccctccagcctgtccctgtgcaccctggaggggcccgttttttccaccgcttagataaaatctagggcaagttcctgaacttctcttttctctctcaggtaacaaaaattcttttgggctcctttagtcacaaagatattcacgatttcaggtattaaagtgcccagccctgggtgattgtcaaaattctgaacttgatttaaagtggcacctcctctcacagtcttcgggagggagagaccggagccaggagtgcagcgtgtttgctggggtctgtcgtggcccactccacacctgctgggtggatccggctggtgccccatgggcgcctctgagatgcccctccccaccccatcagtggcgctgtctcacctgcaggctgcttctcacaggtggtcccccctcactcctcctgcagccccagttcctggctgttcattcttattgggacccgtcaccctcctggaggcggtcccagccgagcccccttaagacagcaccaggctggctccacttggcccccgctggttcagggaagtgctgctgcagccgtttagtttgacaaaggaggcagcgaggccgtctcattggtagccctctcctggcttgcccagccaccacctcacctcgattcctcccaggcctgggtccagcaccagcctaggaagagggtgccccatgctgtctagctcttcttcgggatggggggctccaggttccttggtattttgctttggcctttggagcctcagtcaaaactgaggaaaggtgtcattttcacatctcgtcacacgtacagtgactgcaactaaaagcacaggctttgtagaaacagacatgggttcaggccccagctccaccattcacaaggtgtgtggcttcctgcaaggtaccttcatctctgagttacctgactccatctgagtttccttcttgtaaaactggcatccatgaaagtggctacctcgaagggcgtgaagatgaaatgaggtggaaagtaggtagcccccgaatgagggaagcattgagtgagagctggccctctgacccttctaaaagaacacagccaactttttaaactgtctttccagaaagagatggaaaacttcgaagcccctttccactgccttgccaagcagttccaccagctgtaccgggagaaggtggaggttttccgggccctggcatgacgagctggagcagatcgtgctgcacaaccggagaagacagaattacctctgctcttttaatatataatgatggctttaaataaaattaggagaaaatgtcgaagcagca

SEQ ID NO: 2127 - DNA, 435 bp, Homo sapiens
ccgggcattttcctaggcactagcaacgccaggctgctggtttcgtgtcacatgttccaaaagggaaggctcaccataaccaaggggatgcagcggggacatttccggttgccccagaattggttaccagggccacagctgtggacaaagatgctaaataaaccacctcctaaagagatcatggaagcttagggccagcccccttccccatggccctagtagaggcggaagaattggtcctgctgctgtgagctccccttccccctactccccactcctccctgtctgtataagattggaatggtcaagagagatgggagtgagggtggccactgtgttggtgagtgggtgccccccccatcacccccttgccccgccaagggaaggaggcccaagaggatcctcctgagacaggatgctgccaggaagaggggg

SEQ ID NO: 2128 - DNA, 428 bp, Homo sapiens
gctgattttgctaaggatccagaggatgagaagcagaaagcacgtgttctgccaggacctggacggtggagtgcaagtccacgtaagactcaggaggaaaagaggctgcaaatggaaacaatcagcatcaaaggaggctcagcagagccatgagagggaaaatggggagggcaaagggaattaaagatgggcagggagagcttccagcacccgtgacgggcacgggaggagcgctcgattaaatggctcccagcagtcttgtgaaaggctcaggtctcagactgaaaactgcgacataaacctttagttctgagggaccagtttctggggctgttgaccagcagaggagagggagataaagccagtaggtgagagatgagcttggaggaggtgactgctattgcagatagaattggtggagaggcccc

SEQ ID NO: 2129 - DNA, 631 bp, Homo sapiens
gcacaccatgcacatccatgcacatccgtgagccgcagtggctgtagaactcacccaagccacctctcataccagcgaagaaactaaggcccacagttgttggagtgtgatgaaacatggtgcccagccactgtccaaggcctggctgaaagccgatgccagttcccacaagagaaatataggtttcttgcaactatggcagatggttcctgggagcctttggtggagaaagccagtggctgtgaccagggacctttgctggagtcctagtgcagcagacactttgtttgcttgcgtcccatgccctaaagccacctcccatttaggctgcagctgtagtaacagatctaggcatttcgacgctgcccaccctaagtacccactgcacacctctccactttcctgcctcaaggctgatatggcctgaactagatcactgttgaataaacttaggatcttgacacatggtaagaattacattttatattgtgatcagtttatacaaataggaatatatatataatggaaaccaaagtttcgtgaaatacccttactatgtgtgacatactctgttattttttattctcttctcaattttaactttaaaaaaaaaaggtgcttgcaaccaact

SEQ ID NO: 2130 - DNA, 10739 bp, Homo sapiens
aggggattctgtcatccagaatgcatccaacagcggagtggggcaagcggtcatccagatcgccgcagccctgggcctaagaaccatcaatgtggtccgagacaggtgcgtggggaaggaggcttcatcccagaccatgtcttgggtctttcccacctcccatccctgcggtgcccagttgtccaccagagggcgcccttgcataagcataaactggctttaggcatcgctaacagttggcggctgaaacagatgagtcagtcctaagaaatgaagtccagctggcttttggcgataggatgagtgaatctgacatgtaaagagagggcaggaaggaggtggagactgcccttactgaatagctaagactttctgagactcttggcttgtgataacctcatgttttcaaaaccccagttgatatttgggaatgatttgagctgtattattctttctgtgaactgtctaacccaaggcccctttacccttgcttttgtgtggtacttggaagtgcgctaaatacagacgtgaaggagacaggggcaggtttgtcatctgtcttttacagatgaggaaactgaagtttcagggagcagcttgccctggaagacacagcaagtcagtaatagactcggtttcctcacttactctctttccatcatatcgtccagtttctctaggcctcactgtccatgaatgtggctgtggctgtcatggaagcccactcttagtataatcgacaccagcttcagttcctcagttgtactcgcaaaaataattccatttgccttaaccaaagagacccagagccactcctggtctagactgtgtatgtccaacactctgaagaaccacttgaaaagaggggggaagtggagtttgtcctttcagtagaagaaatcaggaagttaagtgacttctccctgggcacagatggcttctaacactattgagctgtcagggcctgtgaaaaccacccagtctcactctgttgccagtgaggagacagccaagagctattgaagctgcatgaaattaggtggctggtccctgctcaagcctggcttaaacctaatcccagcttcctgcaaaaagaagcacgggttctcccagctgtggcagagaggtcctggggggctttggtggaaaaagctggcagatgtgaccagggacctatgtttggtttccagacctgatatccagaagctgagtgacagactgaagagtctgggggctgagcatgtcatcacagaagaggagctaagaaggcccgaaatgaaaaacttctttaaggtacctaggaagagggacattgcccctccagtccacgcacatgtccctgaagaaagttgacatgcattagagaaactggggactggccccattgttcctctctggaaacctccctttgcctcttggttggttaaagcccattccccctagccaggcggcaggcagcacgcattaagtgcccagatgctgggagggaggcatgagaaacagagtttaggaaacccagtatgacttgcagtttaaacgtttgtggtgggccgcatcagcccacatgtgtgactcttagaactggcaggagaggacctgaggaaacagagacacagaaagagaaagaaaagaagtaacctttcccaaccacctgccttacattttatctgatgatttccacaaaagcttttcaaaggaactgttatctgttttacagattaggaaactaagactcagaaaagaggaaatgcttaaccaaaatcatatagtttataagggctccagagagtcagagctggcctcagtctctccgaactcaaagcctcttaaccttccagaacctccaccccacaacatgcctagtaagtgaccagaccctcagccccttttcactgaaccatctggaggaaccaaagacacacactcaagagcatgcgcttcttgcgaacatttctgaagcagtagatcagcatatataatatcagctgagtcaaagaactgaaaaggggggcacacagggagctgaaacccaccaaactgcatgcagatgccctttgcctattctttcccagagaagatgagttctgccaggtcctaaaatggacaacaggattaagttgctacagaaaaggcccttcttggctggatgaggtgactcatgcctgtaatcccagcacttcgggaggccaaggcaggcggattgcttgagtctgagagtttgagactagcctgagcaacatagtgagacctctgtctctacaaaaaaacatttttttttaattatctggtcatcatgatactcatctgcagtcccagctacttgggaggctgaggtgggaggattgcttgagcccaggagggtaaggtagcagtgagccatgattgcaccactgcactccagcctgggtaacagagtgagaccctgtcttagaaagaaaaagaaaaaagaaagaaaagacacttcctaagcagagaaaaaggtgagttcaaaggcataaacacacacacatatacataagtacgtgcacgcaaacaaaggcataaacatctcatttactccctccttttaacacagcacttgggcaagcttcagaccccatatatagagcggggatgctccctcactgcacttttgttgttttccaggacatgccccagccacggcttgctctcaactgtgttggtgggaaaagctccacagagctgctgcggcagttagcgtaagtcccttgggcctgcaggtccagctcgccagagctctccaggtctttagctgggaggaccatcaagtgactgagtcccatcgccagttcgagccaagtccaggtcagcacaatgttgagtggaaactaggaccaaagtcatccagctatttgggcactggtttctcagccttcccctttgcagatgaccaaaattttggcctatccagctttatttttccaagggaccccagaagtagactgctaagctgcctgccatagaggaatagtcaaggatttataacctagggatgtctgaaaaagtcacttagtcctaacttatttaacctttcaaaatttgtattagcttttaaaatagattctaattttaaaggtaacattatgcttattacaaaacattttgaaaacatgtaaaagtgcaaaggaaaacttaagcataaaagtttcctgttggctgggcactgtggctcatgcctataatcccagtaatttgggaggccaaggaggaagcatcacttgaggccaggagttcgagaccagcctgggtaacatagtgagaccccatcactacaaaaaaaaaaattaattttttttttaagttacctggccaggcatagtggttcatgcttgtaatcccaacaagacaggcagatcacttgaggccaggagtttaagaccagcctggccaacatggcaaaactccatctctactaaaaatacaaaaagactagccaggtgtggtggcaggcacctgtaatcccagctacttgggaggctgagtcacgagaatcatttgaatccaggaggtggaggttgcagtgagccgagatcacaccactctactccagcctgggtgacaaagggagattccatctcaaaaaagaaaaaaaaaagttacctatcaccccactaccaagggggataagccctgttgacaatattaatgcatgtccttccattcttctttcccttaatataagcttctaggccgggcgcagtggctcaagcctataatcccagcactttgggaggctgaggcgggcagatcacgagatcaggagatcgagaccatcctggctaacacggtgaaaccccgtgtctactaaaaatacaaaaaattagccaggtgtggtggcgggcacctgtagtcccagctgctcaggagtctgaggcaggagaatggcgtgaaccccggaggcagagcttgcggtgggccgagattgcgccactgcactccagcctgggcgacagagggagactccgtctcaaaaaataaaaataaaagcttcttgagctagagtgtgtgtaaaaagacacttcctaattaaagcaggaaccccctcaatagtacggattcagctagcgcatacttgctgagcacttactagctaccaggtacagagagggctgcgacactgatgtgccctctgagaattcacaggcttgatgagcaggtgagtcacgtggccagagcactgtggtgagtattcaccatgcaccagactgtgtgcagcgcttgacttacccttcccacaaccacctagacagggggtgcagttctaacctctgttttatacttttaaacaatgaggcccaggccgggcgcagtggctcatgcctgtaaacctagcactttgggaggccgaggcaagtggatcacctgaggtcaaaaattcgagaccatcctggccaacatggtgaaacctcgtctctactaaaaatacaaaaattagccaggcatggtggtgggtgcctgtaatcccagctacttgggaggctaaggcaggagaattgcttgaacccaggaggtagaggttgcagtgagccaagatcgtgccattgcactccagcctgggcttcagagaaacagtgtgtctcaaaaacaaacaaacaaaaaaaaacaaggcccaaagaggtcaagtacctgtcccaaagtctaggcagcaggagagccaggcttgaccccacatttgagcacaccgcttcagccctatacctgacagacaacccctgcggcagacctcaatcccaatgtcattgcagggggaagcgttgttacgggtgtaggcactggagccagaatggctgggttcaagcccctgctctgtgacttactagctgtgggcctgtggaaagttaggcaatacgtgaaaaacaatccaggcctccgtctcttcatctgtaaaatgggggttatataaaccctctgcctctgaagggtggtctaacacgggtccccagcccccaggccgcagaccagtaccagttcgtggcctgttaggaaccaggtcacgcagcaggaggtgagcggtgggtgagcgagcatggccacctgagctccgcctcctgacagatcagtggcagcattcgattctcatgggcatgtgaaccctattgtgaagcacgcagggaagggatctaggtcccatgctccttatgagaatctaatgcctgagaatctgaggcggaacagtttcatcccaaaaccatctcccccactccagtccatggaaaaattgtcttccatgaaaccggtcctggtgccaacaaggttagggaccgctggtctaaaggacactgggcgatatacaaattgctgtacaaatgacggatggacttcagctttctcatctctaaaacaaggttgttacgaggattccctgaggcagtgcatgcaaaatgcttagaactgtgcctggcacatagtagaagcctggtaagtgtcagctagtctgattagatgaagtgcagcagggatacagaagagagagggcttggctcccaggagctactttctacagcaggtggcagtcaaggggcacttaagaccaaactacccagcagcctcagggacagaagtacctgccctaggacagcagctccttccatttggtagttttgaaagtctaccttgtgttgtccccaaatgtgcctgaggtcatccttaatcaacagactcctagaagagccagggagtggggaggtgaacataggttaagtcaagtgaactccaggcttattcacttaaaaattatgttagcctcaatcctgtatgtcagctgacatgggggtgtgggtgtcagacagcaggtactgagaaggcacctcctgcagtgagaagatgcttgtcattgttccctgcaccgtccacatcattccttatctgtagagctgtttcctcacgttgattcttagaatgagcactggcagatgaagagatgaggtctgggccattttcactgcatcaccctaggtcggacacctgtaagtgagagcagagccaaggctgaactcaggcctcgagctcatctggggagagcatgtttcttttcagcacttaatcaaagcctgactggatgggttagatcagtggattcccaatcctggctaaacatacaagtcatccagagcgggtgtgtgtgtgtgtttaatatacattctcgtctcctgattcattgagtctgggattggacctaggaatctggtttcttggttgttttgttttgtgttgagatggtctcactgtgttgcctaggctggaatgcagcagtgcaatctcagctcactgcagcctcaacctcccaggctcaagtgatcttcccacctcagcctcctgagtggggccacaggcatgtatcaccgtgcccagctaatttttttttattattatttatagacacagggtctcactatgttgcccaggctggtctcaaactcctgggctcaggcaatcctctcaccttggcctcccaaagtgctggtattacaggtgtgagctgccatccccagcatgcatttatttattcattcattcatttattttctgagacagggtctcactctgttgcccagactggagtgcagtagtgcgatcagggctcactgcaacctcaatttcatggcctcaggtgattctcccacctcagcctcctgagaagctgggactacaggcatgccgccttgcccagctaattttctgtactttttttgtagagatggggtctccttttgttgcccaagctggtcttgaactcctgggctcaagtgatccacctgcctcagcctcccaaagtgctgggattataggcatgagccactgctcccagctggaatctgtatttttcaacctttcccagagattctgagagcagggtttataaaggaaccagggttggagtagaagcgccatggcaggttcaggaagggctctgtctctgccttgcatccactctttgttctctttggacttttcaggcgtggaggaaccatggtaacctatggggggatggccaagcagcccgtcgtagcctctgtggtaagctgggtgcagagggaggcatgcctggagccgggccagacacctcagccaggccacatcccctggcacgacagctgtctaagcttaggcaatgccccgttcctggaggggagtctgtacccttaagcggtacctgaagttcttgccctcagagcccagcatgtccttcctgtgtctgcagagcctgctcatttttaaggatctcaaacttcgaggcttttggttgtcccagtggaagaaggatcacagtccaggtgagtgcatggcccagtgccaagagtcacagatgagggcagtgcctaaaaatggcagcagaaatgaccagctattctgagccctggaggggtgattgggtccccagccccacagaaggatcaaagagaatagccttagtccagctacagtcagcaaacagttattggactaaactgggttagtcttaggggcgcagaacaagacagacactgcccccgtcctgaagagctgacagtggggaaagatggatagccaaacagagagaatagactctggagccagcctgcctgggttcaaattctgcttccacactactggatagaggttctgcctagccagcagtgggaccttgagcaagttacttaatctctgcctcagtttaaatgtcctaagtttaaactcttgttagccgtgtttgacagaggaggaaattgaggttcagagtggttaagtagcgtgcccaaagtcacctccctgcagggaggtatgaggcacgatgtaaacagatcatctccctgttcatctcctggaggactggctccccagagcgggatctccaaactcaggacaaagaataacatggagttatccaagtgaaggggaggaaggtggtggcatgaaggcagtgtttcaggcagaaaatatcgaaaatcacacgtgcaactaggcactgaagcggttccgagcgacctggagcactagatctgagctggggctggaaaattgggtgagtgggttgtgaccaggttacagaggccttataaacctgattaaggcattcagactcatgggtttttttgctgttttggggggttattttttttgaaacaaggtatcgctctgttgccctggctggagtgcagtggtgtggtcacagatcactacagactcaacctcctcggttcaggtgatcctcccacctcagcctcccaagtagctaggaccacaggcacacgccaccacatccagctagtttttgtatttttagtagaaatggggtttcatcatgttgcccaggctggtctcaaactcctgggctcaagtgatccacccacctcagcctccaagagtgctgggattacaggcgtgaggcaccacacccagacaagactcacgcttaaaggcaactgaggagccagtatagatgactagatttgaaggctgaatgaatttatgtctatggaaaaacacttctcagccgaggccttcacttctcaacttcctgtaccatatagggtccttcgcaggaggcaggcccaggaaggggatgttggtggcgtccggtcgtggggttctaagggagtcctgggctctcagggagagctccatttcctgagcagagctcaactgttccacatcacttggcgtgccaggcatacccactccctctctgggcctcctctggcctccctgcctccgccatccttttcctcccaccattcagtgctcctgtctccactgtggccaggttctgtgagtctgtgccatcttagccaccactctgaagggtggtctctgcctgtctgcccctcagcccctagagccgctcctatgttcccctctccccaccttgacctcactgtcctaaagacaggcagggaccaggctgcctccacagccaccctatccttggcacagccaggactctcaaggctttattggagcttggtgccagctcctgcccatagggcagccccgtgccacatctcaccaagccccagctgctgttctcttgtctgatttcctccaacctcccgcagaccagttcaaggagctgatcctcacactgtgcgatctcatccgccgaggccagctcacagcccctgcctgctcccaggtcccgctgcaggactaccagtctgccttggaagcctccatgaagcccttcatatcttcaaagcagattctcaccatgtgatcatcccaaaagagctggagtgacatgggaggggaggcggatctgaggggctgggtgcaggcccctcagttggggctcccaccttccccagactactgttctcctcactgcctcttcctattaggaggatggtgaagccagccacggttttccccagggccagccttaaggtatctaataaagtctgaactctcccttccaaaaagtagaagtcatccctgtcgagaaggaccaacactgtgcactggtcagctcacagcaccaagaggcccccttcctgcttttctgtcatgtgttcccccagtaatcattttctgaccaccctgaaagcaaagcctgggtgggtactggcagtgcaaaggccagtaggccaccatccctggccccaagctgcacaagcccacagacgagggtcctgtagaacaaacgctttgatgtgcttctcaggtagcctgcggcccagtccagggcttggggaggatcagctgcatggaagagtgaatgccaggctgaggtcatcagggccctgaggaacttggacgtggggtcttcactctcatggaactgcccttctaactggagacatagacaatataccagtggttctcaaccagaggcaattttacccccaggagacatttgacaatgtctggggatatttctggctatcacagcttatgaaggaggttgctactggcatctagcaggcagagtgagtgctgctgttaaacccaccacaggacacagaacagtctcctgcaacaaagaattacccaaggcctggcgcggtggctcacacctgtaatcccagcactttgggaagccaaggcaagcggatcacttgagcccaggagttcaaggtcaacctaggtaacgtggtgaaacaccatctctacaaaaaatacaaacattagccaggtatggtgctgtgcacctgtagtcccagctactcgggaggttgaggtgggaggatcacctgagcctgggaggtctagactgcagtgagccatgatcatgccactgcattccagcctaggcaacagagcaagaccctatatcaaaaaaaaaaaaaaaatctagccccaaatgttcaatgttcatgaggtcgttgataaaccgtgcattaaacaatctcacagtaattaccatagtgactaatgctgtaaagaagatatgtggggtgctgtaagagcagaataaagatcttgccctaggccccagggacaggggtatgcttccttgaggtgaagtttgaaggtgggctctcacaaatgagtgagctttattcaggccgagagaagagcttgacgtgactttttggtatttgcttcacgattcatttgctcaaagcaaagaacagaggcttcagggtgtctcccttatcacctggccctctgtaccctgcactcaggagcctcattcaggacgtatttattgagtgcctagtgtgtgcccaaagctaaggataccaatgaaagaagtgctgctggccctcaggttgcttagcctagtgcaagattgacca

SEQ ID NO: 2131 - DNA, 2540 bp, Homo sapiens
aagggggtcactttccctctcaccgagttaaatctggctctgttatattttttccaggaacacagtatgtctcttcccaatgttttattcggtttctggtttccccacttttgaccggaagtatgtgggaagaatactggctgttattattatgattattgagtgtccaatactctcctccaatatttccaccaagaattattatcgctgctctcctcattcatgttagtgttgctttgtgtgctttagatgacaatcgtcctctttactctccaagtttggagggtgagggttttttgttgtggtggtggtggttgggttcttctttgtttttgtttttttgtttttcctgttcggggtaatgaaatgagaactggaagagaggatatcatttcgaggcccagctgagaaggatcccaatgcgaaaaatttacacacttcaaagagcagaaaggtggaagcgagtggtgcttggacacaaggatgccactgttcttatctcctccaatttgggaagtgcccagcctagaaaggtgagggtcccatctgggagaccatggagtacccccagggtcacactgagcctaagaacttcaaccatcctgcaggtcaaaacccactgataggtctcccaaaatgtttggggtagggggaagaaacatagggcattccaggtctgtaaccctgcaagagagagactcaaactaatatgtctaggtctggggtgaaggtggggggcctgtctggatacctcctccctcaattgaagggctcgttggaaacataggaacccactgctctctgggactctggaaagacaaattttctttggcaaacggaacagtgtcgcgctgtcgacagagcagactatttttcttgttccctcacaaggtgggggtggggggaaagaaaaggaagcaagaaagaaagggaaattaaatccacacgtgttaagctcgctcaaagggccagagtcaaaaccagagatgaaacttcgactccagttctggctgcccgcgggcctctttccaaccagccaggcctcacagagcaaggcatccccactggagagaattcgatctgatgtttcataaagcgctttatttaaggagaaggggcatgggtctgtctccaagtctgtgctgcagaaatccagaatttgtagcggcaaagaaaacaaaggagataacaattgtaatcataatgaccctctttatgaaaactcatcttgatgtcctccaaatcaaaacaacaattcaggcaatattcaagcaatggccaaaatcatccaggccattaaatcatccaggccattgttttacaaaattcctaaggtctgatcaggctttcggacttgggcctagctgggtcaagagaacctgaaatgctgttgtcaagagactctgaaatcaccagtttaatcaggacagctaatctctacatccttgaggcctctcttttggggagagactttcttgagagaggacactacaggactcagctacagagctctgctatacatgggtgggagtggaggccgccaccccacctggaactgtgagtgaaaactctagtaatgatcttgaggaggtgaagggaggtaggtgggggtgtgggtgatgagggaggccaaaccccaatctggaaggatctgtcactgaaacaattgcttggtcgagacctctaatttttcttcctctccagccagtctcctgtggctccctggtgctgggtttctggcctttggtgacatcctaacagaagggtccggaagcagggaccccagacaccttgctccctctcccaaatcacacccaaaacatactggggtgaaacaactgacagagggtctctgtggtgagcaactgactgaagtttccagtggaaaagttcctgacgattgtttccgcagggaccttgaatttcctggtcaccatggcgacctggaagtcccaccgaatgctctcaacaatggggtaccccgaggacattcgtgcaattggctgcgcagtctgaggcctgaaaagcgtttctgccaatcgttcttgactttctggagcctccttagtgggttcaacggagcagggatttttaaaactgcccccttttttaaacaggggagaaaattgagatttagtaccaggtgggttcaggtcctgagcaaaagccccatctttgaattcagaatgctgaccccagggccgatcgtgtagagcctatggtgtatcttaatcgaaacccgtggcccaaacatctcagccaggaacctgggactttaggtgtcacttaatctcttcacacctgttaactacacctatctgcataggaggctccccacatcagtccaggcaacttttttctttgcctggggccatttcttctaaatggaaggagaaaagtctgagcattagaaattgtggcattaatgtctgcaagggctaatggagtgaaaagaatacattattctccttttcttcttagaaaaaaatttcaattgtggatgtaatagaaataccattaaaataatatttctgattgca

SEQ ID NO: 2132 - DNA, 655 bp, Homo sapiens
aagggggtcactttccctctcaccgagttaaatctggctctgttatattttttccaggaacacagtatgtctcttcccaatgttttattcggtttctggtttccccacttttgaccggaagtatgtgggaagaatactggctgttattattatgattattgagtgtccaatactctcctccaatatttccaccaagaattattatcgctgctctcctcattcatgttagtgttgctttgtgtgctttagatgacaatcgtcctctttactctccaagtttggagggtgagggttttttgttgtggtggtggtggttgggttcttctttgtttttgtttttttgtttttcctgttcggggtaatgaaatgagaactggaagagaggatatcatttcgaggcccagctgagaaggatcccaatgcgaaaaatttacacacttcaaagagcagaaaggtggaagcgagtggtgcttggacacaaggatgccactgttcttatctcctccaatttgggaagtgcccagcctagaaaggtgagggtcccatctgggagaccatggagtacccccagggtcacactgagcctaagaacttcaaccatcctgcaggtcaaaacccactgataggtctcccaaaatgtttggggtagggggaa

SEQ ID NO: 2133 - DNA, 2540 bp, Homo sapiens
aagggggtcactttccctctcaccgagttaaatctggctctgttatattttttccaggaacacagtatgtctcttcccaatgttttattcggtttctggtttccccacttttgaccggaagtatgtgggaagaatactggctgttattattatgattattgagtgtccaatactctcctccaatatttccaccaagaattattatcgctgctctcctcattcatgttagtgttgctttgtgtgctttagatgacaatcgtcctctttactctccaagtttggagggtgagggttttttgttgtggtggtggtggttgggttcttctttgtttttgtttttttgtttttcctgttcggggtaatgaaatgagaactggaagagaggatatcatttcgaggcccagctgagaaggatcccaatgcgaaaaatttacacacttcaaagagcagaaaggtggaagcgagtggtgcttggacacaaggatgccactgttcttatctcctccaatttgggaagtgcccagcctagaaaggtgagggtcccatctgggagaccatggagtacccccagggtcacactgagcctaagaacttcaaccatcctgcaggtcaaaacccactgataggtctcccaaaatgtttggggtagggggaagaaacatagggcattccaggtctgtaaccctgcaagagagagactcaaactaatatgtctaggtctggggtgaaggtggggggcctgtctggatacctcctccctcaattgaagggctcgttggaaacataggaacccactgctctctgggactctggaaagacaaattttctttggcaaacggaacagtgtcgcgctgtcgacagagcagactatttttcttgttccctcacaaggtgggggtggggggaaagaaaaggaagcaagaaagaaagggaaattaaatccacacgtgttaagctcgctcaaagggccagagtcaaaaccagagatgaaacttcgactccagttctggctgcccgcgggcctctttccaaccagccaggcctcacagagcaaggcatccccactggagagaattcgatctgatgtttcataaagcactttatttaaggagaaggggcatgggtctgtctccaagtctgtgctgcagaaatccagaatttgtagcggcaaagaaaacaaaggagataacaattgtaatcataatgaccctctttatgaaaactcatcttgatgtcctccaaatcaaaacaacaattcaggcaatattcaagcaatggccaaaatcatccaggccattaaatcatccaggccattgttttacaaaattcctaaggtctgatcaggctttcggacttgggcctagctgggtcaagagaacctgaaatgctgttgtcaagagactctgaaatcaccagtttaatcaggacagctaatctctacatccttgaggcctctcttttggggagagactttcttgagagaggacactacaggactcagctacagagctctgctatacatgggtgggagtggaggccgccaccccacctggaactgtgagtgaaaactctagtaatgatcttgaggaggtgaagggaggtaggtgggggtgtgggtgatgagggaggccaaaccccaatctggaaggatctgtcactgaaacaattgcttggtcgagacctctaatttttcttcctctccagccagtctcctgtggctccctggtgctgggtttctggcctttggtgacatcctaacagaagggtctggaagcagggaccccagacaccttgctccctctcccaaatcacacccaaaacatactggggtgaaacaactgacagagggtctctgtggtgagcaactgactgaagtttccagtggaaaagttcctgacgattgtttccgcagggaccttgaatttcctggtcaccatggcgacctggaagtcccaccgaatgctctcaacaatggggtaccccgaggacattcgtgtaattggctgcgcagtctgaggcctgaaaagcgtttctgccaatcgttcttgactttctggagcctccttagtgggttcaacggagcagggatttttaaaactgcccccttttttaaacaggggagaaaattgagatttagtaccaggtgggttcaggtcctgagcaaaagccccatctttgaattcagaatgctgaccccagggccgatcgtgtagagcctatggtgtatcttaatcgaaacccgtggcccaaacatctcagccaggaacctgggactttaggtgtcacttaatctcttcacacctgttaactacacctatctgcataggaggctccccacatcagtccaggcaacttttttctttgcctggggccatttcttctaaatggaaggagaaaagtctgagcattagaaattgtggcattaatgtctgcaagggctaatggagtgaaaagaatacattattctccttttcttcttagaaaaaaatttcaattgtggatgtaatagaaataccattaaaataatatttctgattgca

SEQ ID NO: 2134 - DNA, 2009 bp, Homo sapiens
gttccggacgtcttggccccgggaataaataaagacataaaccaacccggctttctccggaggaatgagggtgatgaacataagacacaaatagagccaagatcgactttcttaggaagggggagaggagggaactcttcacgaagggaggtgggagtccacctcagacctctattggaaggaaatcgagttgttccgggggactgaggtctcttgcataaggcatgggatccttattattattattattatttttaaatcccccgcggaggagctctgggcaaatgaataccgaggcgccgctctagctggttaggcttgggatgcgataactcagtgccctcttgcagacttgcatagaaataattactgggttgtcgtggaggggacacgagacagagggagttctccgtaatgtgccttgcggagagaaaggtccaagaatgcaattcgtcccagagtggcccggcaggggcggggtgcgagtgggtggtggagtaggggtgggagtggagagaggtggtttctgtagagaataattattgtaccagggcccgccgaggcacgaggcactctattttgttttgtaatcacgacgactattatttttagtctgatcaatgggcacaatttctaagcagcgcagtggtggatgctcgcaaacttttgcgcaccgctggaaacccactaggttgagttgcaaaacgtaccgcgtagacgcccctggtggcgccgagagaagagctaggcctgcccagcacagagccggagagcgtcgggccttccggaagggtaagttctccgccaaggggtcccgagggagctggacgtctgaatctggacttgcccccagcttcggggttcgattctgggttttgcgcgtccccaacccccagggctttccgaagcatggcctggctccaggcccggtcctgtaaggactggaacggcagcaaaatgtgcagggaggcagtcggccggcagagctgcggcgggagccaaggtcaggcccgcggggagagcgggcagcttccagcgccggccacaagctcccaggccagctgggccgcagacccctttgcttccagagagcacaacccgcgtcctttctctcagccaggctgcagtggctgccccgagcttcgctttcgtttcccaagctgttaataacgatatgtccccaaatccgaggctcgtgtttgctcccagatgccaagaacgcaacccgaaatccttctcccaaaccctaggtcgacgagatgagttcctacttgacctctgagccgaggtgggccggaaaccgaggcctaggccccgccggggctgcaaggaaaaggggaaactccgagcgtagcgtcttttccttgtggttcctttctccggcatcccggactgcgggccctgcagccacctggaccggcattcaaaggattctgcaagtccagcttcacagactggctttcccagacgctccgaagcccgcaccacgaacagaataaaggagagacgagagatcgcaactagatttgagaatcctcgttcttttccccaatcgttcgggcagtaaactccggagccggctacagcgcgcatcctcccttcctcctttcggagaactgtcgctttcccgaagctgctcccagctgggttttctcccgaagtttatttttctcattttgcaaaattcctgccctgattttaatactgcaacaggacagcagaggttcctctttaaaaagtcaaaacccaaaccaaaggggcccattgctgttgataatttttttcttcaccttctccttccgtttttaagaaagacacttccaaaactacccattgttttcctctcaaaagagaactcgctttaaaatgcatccctttctatttctctccggatatgtccccacctgacccggtggcaacttgtggggcgtgggggtagtgaaaaatagaagtgtggacggggctgggaaaatgaataagaattataacaatagaaatgatgacaaaac

SEQ ID NO: 2135 - DNA, 364 bp, Homo sapiens
gggttttctcccgaagtttatttttctcattttgcaaaattcctgccctgattttaatactgcaacaggacagcagaggttcctctttaaaaagtcaaaacccaaaccaaaggggcccattgctgttgataatttttttcttcaccttctccttccgtttttaagaaagacacttccaaaactacccattgttttcctctcaaaagagaactcgctttaaaatgcatccctttctatttctctccggatatgtccccacctgacccggtggcaacttgtggggcgtgggggtagtgaaaaatagaagtgtggacggggctgggaaaatgaataagaattataacaatagaaatgatgacaaaac

SEQ ID NO: 2136 - DNA, 277 bp, Homo sapiens
tgcagggtttggcagcgatgcaggcagcaaggagagaaagggtgacagagagaaggcgtccaggcctcaggtgccgacagaggtctttggcggtgggacgggagctactcctcctctgggtcctctctcagctttgttccattctgctgccaaccccatctttctcctgactgctcaggaaagacaaaatttaacttctctccccctgtttccaacaggacatctaatgtccctcaaagctgctggctggctctgtagtgcctccacccattccttt

SEQ ID NO: 2137 - DNA, 277 bp, Homo sapiens; identical to SEQ ID NO: 2136

SEQ ID NO: 2138 - DNA, 440 bp, Homo sapiens
gagagactcaaactaatatgtctaggtctggggtgaaggtggggggcctgtctggatacctcctccctcaattgaagggctcgttggaaacataggaacccactgctctctgggactctggaaagacaaattttctttggcaaacggaacagtgtcgcgctgtcgacagagcagactatttttcttgttccctcacaaggtgggggtggggggaaagaaaaggaagcaagaaagaaagggaaattaaatccacacgtgttaagctcgctcaaagggccagagtcaaaaccagagatgaaacttcgactccagttctggctgcccgcgggcctctttccaaccagccaggcctcacagagcaaggcatccccactggagagaattcgatctgatgtttcataaagcactttatttaaggagaaggggcatgggtctgtctc

SEQ ID NO: 2139 - DNA, 2009 bp, Homo sapiens; identical to SEQ ID NO: 2134

SEQ ID NO: 2140 - DNA, 1086 bp, Homo sapiens
  SITE (573): n equals a,t,g, or c
attaatatctacatatattccatttgttaaaaattctcatttactattttgttttccagactgagtttagtaattgtcacaggtagtttttttacggctgggtaattttttttttttttgagacagtctcattctgtcacccaggctggagtgcagtcacatgatcttggctcactgcaacctctgtctcttgggttcaagcgattctcctccctcagcctcctgagtagctgagactacaggcgctagccaccacactcagctaatttttgtatttttagtagggatgaggtttcaccatgttggccagtctggtctcaaactcttgatctcaggtgatccacccgccttggcctcccaaagtattgggattacaggcatgagacaccgcacccagcctagctgggtaatttcaaacagaattccaagccttaacttttagaatgctagctatctagggaaaaaatagagaaaatctcttctccattttggctttagaaaatgaatacatttccggccgagtgcagtggcacacgcctgataatcctagcactttaggatgccaagaggggntggatcacctgaggtcaggaattcgaggccagcctggccaacatggtgaagccttgtcgctactaaaaatacaaaaattagccgggcgtggtggtacatgcctgtaattccagctacttgggaggctgaagcaggaaaattgcttgaacccggggtggaggttgcagtgagccaagatcgtgccacttcattccagcctgggcgaaagagtgaaacttcatctcaaaaaaaaaaaaaaaacagaaaagaaaatgcgttcttttcccaccagaaaatgtggtaggtaattggtgaagttacatagattcttgaaaacattagtacctctttttgcatggtaaatttgtgacagtgaatatttctagtcctataccctgttatcttgatttctgagttttatgctaaattttatgagatgaaacttggtacctcctagaagtgtttccaaatgaataattgtttactacataatttttaatggaaataataaaataatacatttattatctaaaa

SEQ ID NO: 2141 - DNA, 1049 bp, Homo sapiens
ttgaaacggagtctcgctctgtcgcccaggctgaagtgcagtggcacgatctcggctcactacaacctctgcctcccgggttcaagtgattctcctgtctcagcctcccgagtagctgggattacaggcgcccgccaccatgcccggctaatttttgtatttttagtagagacgggtttcaccatgttggacaggctggtcttgaactcctgaccttgtgatctgcccgcctcggcctctcaaagtgctgggattacaggcgtgagccactgtgcctaatgtaaattttttttttttttgagacggagtcttgctctgtcgcccaggctggagtgcagtggcgcgatctcggctcactgcaagctccgcctcctgggttgacgccattctcctgcctcagcctcctgagtagctgggactacaggcgcccgccaccacgcctggctaatttttttgtatttttagtagggacagggtttcaccaagttagccaggatggtcttgatctcctgacctcgtaatccacccgcctcggcctcccaaagtgctgggattacaggcgtcagccaccgcgcccggccctagtgtacatttttgatactatattttaattaatcattttttgagaaatcattggatggtactttttaaaagatttgttttccgtttgtaaaaattttctgtaagaagaaagcaaagagtaatccctggacactattgtaaaaaatctctgcgcctcttttccttttatcttccataggcacagagatcttatcagaattttggggggtcacagtttccctttggaaactttatggggtgatgtgtcctcggctacccttcagatttttcctggtcctgggtttcagtactgtctgggaataaaccatgatacccaccatgactatgtctgctagagtgcctaatgaatatcagctcctgggtcattttctcccacaggactgcctgaggtacaaagtgtagcctctcgagggagcaggtggatgccctggagctgagagaaatctcctggtgcactcttccttgga

SEQ ID NO: 2142 - DNA, 6800 bp, Homo sapiens
gtgaactttgaggcgctgatcatcaccatgtcggtagtcgggggaaccctcctcctgggcattgccatctgctgctgctgctgctgcaggaggaagaggagccggaagccggacaggagtgaggagaaggccatgcgtgagcgggaggagaggcggatacggcaggaggaacggtgaggtggtggtgatgcccgctgggaaggttacttcgaggggattcagatctgcaaggccatggaaatcacatggatacatcctgagttttcctcagtttttagaaattaagaatgtgtatagtgcccaggggatcttctaggtcgtggtagagagcgagagactgtgatgggaacctagcagtggctgcgaaccttgcttctataggcttcctcgcccggtgtcctcccatcggtgcagtaaggctgagtctgtgcgcggtgacacgggtgtgtgacggctgctaaggcggctcgtccaggcccagcatttgccaagagcaagctgaggctcagaggggacagcgtctgactgtggctgggtcagctctcctgtcgccctttccctggtgacacagcactctcctgagtgcttgctggggctctggggcaaccccaggaggaggtggtgtaatccacacctggcaaaggagaggacctgaggggccaactgtcaggttggcggcgggcgagggtggaagcgggacagattttccatgtagtcaccttgaagtcacatgctactaagtaaaagctgacaatcgcattttcctcaccatcttcagaacctggtgtatgatttttactgtgttttctttgtatgaaaaaagctttttaaaaatcacggtattgggcatttgaattgcttttattgaaaagagtagagtaatacattggaacggcctttgaagactgggttcgttgtcaccttgcctgtcctggtgggtatgtggcctgatgaccaagcttgtcctcaccctggtttcactctgggaactggagggaagccaccagaagaaacctggcgcccccactgagggacacggaagggcgtgtctagcagttacaccaccgtgcgctgtcgtttggtgctcataatgttcctctgtgttttaggagagcagagatgaagacaagacatgatgaaatcagaaaaaaatatggtaaggactggtcacgcctcctttttgtctggttgggaggcgatggcacgctgtctcggtcctcgttagtgccagtggggcctgagatggggctgtgggttcacccatcggaacagaaggacgtctctccagagaggagcagctggcggttgtccccagcggttctgtggtgaactcactcctaagaatatctttatctcagccagtcgtcttcatgaagtctgttttctcagatagctgtttgcttatcgagtcccaagacttctgggctggaagtctgcagctgttctgccgtcgtgtttggcttcctgtgggcacgcctgcgtagccgaggtgctgtgagtttcagggcggccctctcatcctcgggagcgttgctcgttgccatcttctgagtgtggcaggcgctccttccaagcactccccagcaccggccctgctccttctcgcccagcctcggcgttctgttcttgtttggttgtgtctggagagattttggagaggagctttgaaggagccagaatgaatgtatttgccaagtgtaaaccttttatttagttggagtgaattggaaatacacattacgttatctatactcccccaaaccacgtgatgttcactgcttaacactgaacaccaccacccagccgtgcttcgttgattctgtatgattttaaagtccgcaaagagtctagtgtctcccgcgctgggtttgtggttgtgtggtgtcatgggcgtctcccgcgctgggtttgtggttgtgtggcgtcatggacatggtgggaactgactcctcgcctgtgcgaggtgcgtggtcctgggttcatggcagccgtgggcctcaggaatctgtcgtcctgcgcccacggtgctttccttgaagcagtatattaaaggctaaacctaattggaaaatttcagagccttttctgactaatgcacgtgttttgagtcttctgtttgttttagggaatatcatatatttgtggtattttagggtcccacccactgggggcatgaggacgtcgctgcggttctcggtcatcgggtggggggtggacggcaaagcccagcagccactgtgagcggcgcctccgtcaggtgcaggtgattggcgttgggttccctctcatgggggctgcagaggccccatgctgctggtgccctggactgtaaacgctgggtggctctgcccactggccgggacgtcccctccctgtcagttctggcctccttggaaagtcacctccatgtgactgtgctgtgacctgaggccacgtgagtcctgccggtctcgaagtgtcggcttgggggcgtgaggctgccttggctgctggcctcgagatgcccagtggctgatagaggctttttcctatgtgttcccgcccatcagtctcctgagtgccgtgtgcttgggcgctgactctctgggttctcttcactgctgccttgtccttgccccaccctctctgtcgcctgttgtttcccggtgtgtgtctggagtgggtggtgaccgggtacctgcgtgtgactgtcataaggagcagcaccagggttgccctcctcagcgagtgcatgcctgtgtacgtggagcgtgggcccagcagcatctctgcaggccttggctggaggcattgtgctttccttgaaatggaagagtcaagagctttttggcacctaattttttttttttttttttttgagacggagtctcaccttgtcgcccaggctggagtgcagtggcgcgatgtcagctcactgcaagctctgcctcccaggttcacaccattcttctgcctcagcctcctgagtagctgggactacaggtgcccaccactacgcccagctaattttttgtattttttagtagagatggggtttcactgtgttagccaggatggtctcaatctcctgacctcgtgatccgcccgcctcggcctcccagagtgctgggattataggcatgagccaccacacccagccagactaatgttaatgtaaataaaagacaaggtggatacacacacacgcacacgcgcacacacgcacacactgcccagcacctgttatcaccaagcacaagctgtgtttaagttgctcgacctttactgtgccctgactcccagcgggtgtgaggctgtgggtggccggccaggctcttggagtggtgtcttctgtgtcagggccctgattgacttgcacttgccattttggtggttaatttggccctttaattgcattgatgaaatgagctttttgtgccagtttgtaataaagccattgaatggcctgtgctttggaaagcctcggctagttagaagaattcctaggaattcctgatgggagagtgcgagaaagcatgtgagtccacctggtgcagttatataaaataccagcacgcacgcaaaaacccttcttttggttttggttttccctctaaactggaagtatactcaggagcgagtttttcaataagaacttaaccagcctccttgctagtatctgatgactctttcccaaaaccgactttgagcctcactcccaaagcctgatgcctgtggccctccttgacaggcaagaaagaaacatggctaggcccttccttaccatccctctgcttccccgccgcctcttccacccagcccccagaatacatgcagtgagtagctttgttgtaatcgctgcagataattttagtgtacaatacagattgttaaagggagagagaggccaggcacggtggctcacgcctgtaatcccaacactttgggagaccaaggtggtggatcacctgaggttgggagttcgagaccagcctgaccaacatggtgaaaccccgtctctactaaaaatacaaaaattagccaagtatggtggtgggtgcctgcagtcctagctacccggaggctgaggcaggagaattccttgaacccaggaggcggagattgcagtgagccgagactgcgccattgcactctatcctgggcaacaagagcaaaactctgtctcaaaaaaaaaaaaaaaataaagggagagagagtgtgtgtatgtgtgtgtgtttctgcagtgtgaagggaaaactcctggtctttgggtaagtagcacaggtttactcttatgattaaatacacattttatcccagttttgtcagagtactcgagagttagattgatggtcatcttagttctttctgtagccttaattccaaaggtttaagagcagctataagcacaaagtaaggttattttgtttaatagtagccatccactgtggaactagccaaccactgtggaaagaaatacttgccttaaatttcttttcttcgccgagcatcaggaagtaagtgcttatctcttaggatctgttagagttcttgtttctagtaaattttatttcagttttaaagtttaaagtggtttgacttcaaaaaaggttaagcactgtatgagagcctgcttacaacgcccgttgttgctatagcctcagtaaatcttcttataaagcttggtttgtatggctttctaagattttgtttctggttgaatgaatgaagttatgattcaagtttattttgtttcaggcctgtttaaagaagaaaacccgtatgctagatttgaaaacaactaaagcgctccagcacatcagtcccgacgcttcctgtgaggtgcacactccgcagcccagcccagccgggagaccacgtggccattgcggtctcctgaccttggccagtgaacctgccagccttccaggacaggcggccggagagctgcccctgaaggacagtcctctcgtcttgcagactggtgaccttctattccctgttcatctctgtttctagatttagtcacttgaaataagaaatctttggggtttgggcttttttatactcttctcagtttgtgaaacgctaactgcacacgaagccgcctgacggcacccagcgctgtggctgtcattctcccagggcagaaccctgcgtttctctctgtccactaacaagcttcacacgcaacacagggaagtcggtttgacttttgtcatgaggagaactgaccagccctcatcattccccataaaaccacggacagcgtctgtgtgcgcatcttgagtcttcacacctgttgactcacacggcttttgctgatgacacggggctccagtacacagtctgataaggacttaacgtcctaacctcaattgtattaaatagcattggggaatagctaaacctttttaaaaaaatttattggattttcctccctgcttaaaagatttcaccagaaaaccttcatataaaaattcaggccctttttggacaatttttaaaatttgtatctttactagaacatgagaatctttttcccttggaagcttgaattataaatgtggtgtttggcctgcctcagcagcaccagttgactgctcgtgtgccagcggtgtggggaggacggggcaggacgctgcagctctctccagccctgttggcatcctcagtgcctgcaggcctctcgctgcctgttgggctgtctggggggtggccatttagggatcgtggggacggggtccaccccaagaagaaagaaaggcccgtccacaggcccggctctgggccacgtgccccggaagcaggtgtgtccagagtcagctgagggctctccccacaccacccagcaggcgctggtgctccttctgcctcatgggaccagtccagcttccagccgctctggctcgagggtggtctgagcacttccttctgagtgggcttctctgggagctctccagtggcactgctggacctgcccacgtttctgtaaaatcaggatacgtggctttagtaagcagaccaagcgcttcgtggcagggaaagcagcgtgcggggaagtcactgaaaagtgctgcctaaggaagtttggaaatagtccccgttccagattgccttgaattttaaaacattttgctttgggaaagtaggtcagcagcacctaagatcaaggatgcgttccattttcacacttcacagtcatgaaaactgagaagactgtcttcagcgtgaactaaagttcacaggcagatcactgatccagaacacttcaagaactcgtcaaacagctcgataagcctttttgactgtgtacatctgtaccgggaataacattcctaggctgaaatttccacaaagaatagaacctgtacccagttcttcaggctgatttccctgacctcttgggcatttgtatttgtagtaaagtattgcagagattcctaagtattttatagcagccatcaaaattggactttgtattgtttattcataaaagacacttggtaatagacttcagtgaactctgtatgaatgcagtagtgtgcgtgcaaaatccgcttcctgagcgtagggtgctgagctggcgctagggctcggttgtgaaatacagcgtagtcagcccttgcgctcagtgtagaaacccacgtctgtaaggtcggtcttcgtccatctgcttttttctgaaatacactaagagcagccacaaaactgtaacctcaaggaaaccataaagcttggagtgccttaatttttaaccagtttccaataaaacggtttactacctgcgtgtgtttagtatgccgcgtgttcctgtgttc

SEQ ID NO: 2143 - DNA, 454 bp, Homo sapiens
gatttggcctcccaaagtgctgggattataggtgtgagccactgtgtccagccaaggaggctgtttgaactgcatgattgaaaacacatttgcaaaagtagttttagggtattttttaattgcctctggtttgaactgaatggaaaaatcttggctgatttcaatgtatagatcttcaaaagaagtttaaaaggatagtaagatctgttttaaatgtgcacgtgtgtctgaaggctggttaaggaaatcataacagggtttgggaccgattagccagccgttcttcagccccaaggtcctcaaaacactcagatttgaagatgatcccgtcttgttctgtggtctcgtccgctcctccacggtcattcttttcgaacctggccgccagtatgtgccctgagagtctatttctcttgtaaatcattgtaatattcttgactttggtttaaataaa

SEQ ID NO: 2144 - DNA, 486 bp, Homo sapiens
ccaggctgtgtcctaaaactgtgcccacgggcctgcctcgcaggggaggtcttggctgtctctgccctccacagctgccctgcgcaccgcatgccctccactcgcgctgggtgccgagggccgggggagaaggcagggctgcctcgggaagggcgaccttggcccccccgtgtgaaacgcacacctgcatgaggctcccgcgctccctgctcccctcgcgtccttccctgggtgtctccgtgccaggtttttagggagtgcccccccaccccggcccccttctgtgttgctcctgccacttcagtcctctgggacacagggttgagtccgagcagcagagtattggtatgtctgtctgtcccgtggacctgccccgcagggcccagcgtttgtggctacgagcaccagcccgtctgcggcggaaaccccctgtgctcgacccgcttccggctcattcaggaatgtgtggcaactgcagacttgcat

SEQ ID NO: 2145 - DNA, 419 bp, Homo sapiens
aagttacagtgagccagagggttctgcaggcccctctccagaggttgaagaaggccacgaagctgtagagggagatttgggtgggatgtgtgaagaaagaaaagtaggaaacaactcatctcatttcctacagccaaatgttcgaggtcccctgttcttatgtgaagactcagagctggagtctccgctgtctgaactgggcaaagaaaccatcatgctcatgactccaggcagctttctctctgacaggattcaggatgccctgtgtgccctagagagttcccaggctctggaacccaaagatggtgaggcatctgaaggagcagaggctgaggagggtccagggacagaaacagagacaggcctgccggtctccacactgaattcctgcccagagatccatattgacacagcagaca

SEQ ID NO: 2146 - DNA, 875 bp, Homo sapiens
gtcgaactcatcacatgcaatgtaatcttaccactgatcagcaggctgtcagatcctgactggatccaccttgtactcgtgggtatcttttccaaggccagagatccagcaccctgcccagccagtgcccccgaacagccctcagtgccgacatctctgccactgattgctgaggtagagcagcttccagaagggagagcttctccagtagcagccccagtattcctaagttacagtgagccagagggttctgcaggcccctctccagaggttgaagaaggccacgaagctgtagagggagatttgggtgggatgtgtgaagaaagaaaagtaggaaacaactcatctcatttcctacagccaaatgttcgaggtcccctgttcttatgtgaagactcagagctggagtctccgctgtctgaactgggcaaagaaaccatcatgctcatgactccaggcagctttctctctgacaggattcaggatgccctgtgtgccctagagagttcccaggctctggaacccaaagatggtgaggcatctgaaggagcagaggctgaggagggtccagggacagaaacagagacaggcctgccggtctccacactgaattcctgcccagagatccatattgacacagcagacaaggagatagaacaaggagatgttaccgcctctgttacagctttgctggaggggccagaaaagacctgcccctcacggccgtcatgcttagagaaggatctcaccaatgatgtgagctcccttgatcctactctgccaccagttctgctttcctcctctccacctggtcctctcagctcagccaccttcagctttgagcccctaagcagtcccgatggtccagttatcat

SEQ ID NO: 2147 - DNA, 875 bp, Homo sapiens; identical to SEQ ID NO: 2146

SEQ ID NO: 2148 - DNA, 875 bp, Homo sapiens; identical to SEQ ID NO: 2146

SEQ ID NO: 2149 - DNA, 303 bp, Homo sapiens
agcctcatagttccaaatgctccaggcttgagagccccaccctgaatgccacctgttgctcttacttggtctttccttctcagtgctgttctgagggactgctttgctcacatcagctcataatgaatacctgtctccagaaaattgtaaagcaccagccacaactcccaccaacgaggaggtagttttttccacctcttgcccacagtatacctcaaccgaaaaataatagcccattcctaatgagaaggcgcacatatatacttctcccacagcgtttcattgtgtcttaactaccctgtc

SEQ ID NO: 2150 - DNA, 1417 bp, Homo sapiens
gagactgaagtggcaagaagaatcgaatatactctgttctaacctttctgatgtttgcttgttaagtgggaaacttaaaaatttctactgtccactatagtagtactttgaaaaataagttttctcccagcacaaaacccatgtcagccacacacaagtagcaacctacaggcctgtctcttgacctctcgtttataggcacaagcctcccacaggcccagaattattttgcccaccagctgcttgccaggtctgatactcacctaaaagaactttagggagcattgccaaaccagcctgatgaaagggagttctcatgtatctaaatgagtagcaagaattcacatgggaacttcatttatgtcagtggactgacaatagcagatatgatcactaagctttctgtgaagtaaataacaagtctgctttcactttctgttggataagactttggaatttcagaattttctttccaagatgtcaaattaaaaatggtttttattactcagtggctatatgacattgctttttagaacttatctgtgagttttatgtagacaattcatttgcctccctcagcgtgactcttgtaggatttgtttctgatttgtggagttaaaactgttttgaattaatgggctgggaacatggaaagaaatatgtaattaatgaagaaatattagcaccccagtttttagtgatatttaccattactagagttctggattcactgaaaaaatgaattttggtctatatgcaacatattccttaactataatgtttcactatttcctaatagtatgacatcatctctactacctttaaattgtcctttggacatagaaaagaaaagaactatggacccacagtacctcattagatgcccttgggaccagatgtgcattggaattcagaattttttggattttagaagagaaatatagtctgtgtaacatacattatgtaacactccagactctgaaacatttttaaagcaaatatatatataaatatttacattaaatggcccaaataaaaattataagtagtgtcaccaagtgaggtacggctttgttgccaaagttctttttaaaaaaacttcctgaggccaggcacggtggctcacgcctataatcccagcactttgggaggccgaggcaggcggatcacctgaggtcaggagttcgagaccagcctgaccaacatggagaaaccccgtctctactaaaaatgcaaaattagccaggcgtggtggcgcatgcctgtaatcccagcactcgggaggctgaggcaggagaatcgcttgaacctgggaggcggaggttgcagtgagccgagatcgcgccattgcactccagcctgggcaacaagagcaaaactccctctcaaaaaaaaaaaaaaaaaaaaaaacctattt

SEQ ID NO: 2151 - DNA, 104 bp, Homo sapiens
atttttgtatttttagtagagacggggtttcactatgttggccaggctggtcttgaactcctgacctcaagtgatccacctgcctcggcctcccaaagtgctgg

SEQ ID NO: 2152 - DNA, 453 bp, Homo sapiens
ttttttttgagacagagtctcagtctgtcgcccagactggaatgcagtggtatgatcttggctcactgcagcctcgacttctcgggtacaagcaattctcccacctcagcccctggagtagctgggactacaggagtataccaccatgcccaactcgtttttatatttttatagaaatggtgtctcaccatattacccaggctggtctcaaactcctgggctcaagcgatccatctgcctgccttggtctcccaaagtgctgggattacaggtgtgatcctctgagtctggccaatttttatttaaagatattttttaaattggactggacgcggtggctcatgcctgtaattaatcccagcaactttgggaggccaaggcggatggctttagaccagcctgggtaacatggcaagaccccatctctaaaaacaaaaaaaggaagaaaaaagc

SEQ ID NO: 2153 - DNA, 477 bp, Homo sapiens
tcagcttcaggctctgaagggttaaatgtcagctctgggacaagagaccatttcaggaaatggaatttgattcttggttttgttgccccctcccctccagcgtaccatactttccccgcatttacttacgtttcaggtgtcaacatggtgactcacccaccctcagggcagaagggctacccgctgccccagtgaaattcggtttgaatagggataacctggtccctccatgcagcccggaaatggctgtcaggacctgccaagggcttagtaggttggaatgctagtggacgtggccacatctggatctcatccccccgcccccgtcagaggggattggagagatgagggcagctccccaagagtcagtgccgcctctggtctggccacgccttgctaccctcccagccttccgctaccatgctctgatctcggtgatggtctcattcattgggcacccggacatgtacactcctt

SEQ ID NO: 2154 - DNA, 428 bp, Homo sapiens
tcagcttcaggctctgaagggttaaatgtcagctctgggacaagagaccatttcaggaaatggaatttgattcttggttttgttgccccctcccctccagcgtaccatactttccccgcatttacttacgtttcaggtgtcaacatggtgactcacccaccctcagggcagaagggctacccgctgccccagtgaaattcggtttgaatagggataacctggtccctccatgcagcccggaaatggctgtcaggacctgccaagggcttagtaggttggaatgctagtggacgtggccacatctggatctcatccccccgcccccgtcagaggggattggagagatgagggcagctccccaagagtcagtgccgcctctggtctggccacgccttgctaccctcccagccttcccctaccatgctctg

SEQ ID NO: 2155 - DNA, 428 bp, Homo sapiens
tcagcttcaggctctgaagggttaaatgtcagctctgggacaagagaccatttcaggaaatggaatttgattcttggttttgttgccccctcccctccagcgtaccatactttccccgcatttacttacgtttcaggtgtcaacatggtgactcacccaccctcagggcagaagggctacccgctgccccagtgaaattcggtttgaatagggataacctggtccctccatgcagcccggaaatggctgtcaggacctgccaagggcttagtaggttggaatgctagtggacgtggccacatctggatctcatccccccgcccccgtcagaggggattggagagatgagggcagctccccaagagtcagtgccgcctctggtctggccacaccttgctaccctcccagccttcccctaccatgctctg

SEQ ID NO: 2156 - DNA, 342 bp, Homo sapiens
ctctcagggaggtggtgtgggggaagcacctctctgaccagacctgtgtaccctcttctttccttaggacaggagtgactagggtcatcaaggacaagctggggccagagagacatttcccagagtgactccagctcaaggcctccctgtggtcaggcttctttgtgtgtttgctcctagataggcctctctaggtactcaggaggtggaatagaattccaggaccatagccccagatggaagggagcttagagactgtctctcttaatagccccattagataaataaggaaatcaaggttctgagagaaaagggggctgggccagagtcacccagcaagtc

SEQ ID NO: 2157 - DNA, 342 bp, Homo sapiens; identical to SEQ ID NO: 2156

SEQ ID NO: 2158 - DNA, 913 bp, Homo sapiens
ttaattctagaactacaaaatttaattcaagaaaatataggtcccatgaaagacttaaaagttttataaagctaaaatctagtttttcccgataaattgtactttagacaaaaccctcccaacgcttctaaaataatactaaaaggggcatctgattatacaagagcaatttaaaaaattaaatatttatttgaataacaagtttaagttcaagctgcaatgctggcaatgcaggtttttaacacagatcacaaaaagcgtgcacaaaaaagtactgacgcaaaggacaaaataatgctaagaattaggccaaatagctgctgattttaagaaaacaaaaggcctgaaatcactatacaaaatagaaaatgtattaaacactaccatccacagaacagtcttcactattgattatatttaaaaattatttgtgtaattatatattgaattgtaaatgagtattatacatgaacctccattcggaaggcaattccttgtagcactatagaacatctaattacattgcaaaaagtatcctttttttgctatcgataaaacagttaatggtattactgtaaatatcaggaaggctacaaaaaaagaaataagatttcttttttgtcttcaaagtgttttccatgcagtgaagcacttgctgtgttgaactgaatgcactactggagaatgttctgggtccgagatgctcttgagagacaagactaggcttttcaaatcaaacactcaaaggaatcatgcaaccctcttatgactgggataccgtcatgtgccacttaccaatgctgtctctccagaaaaccattcaagacgcttaaaaaaaaaatcagacttatatgataaatatacataaaatgaagacaccaactgctatttgacacgactactggtaatgtct

SEQ ID NO: 2159 - DNA, 919 bp, Homo sapiens
ggaaagtctagagtctgcagggtggaccaggaggctggagacccagggaatagtcgatgttgtagtttaaggctgaaggctgtctgctggcagagttcttccttctgtgggggaggtcagtctttgttctgttaggatcttcaactgatagatgaggcccaccattgttgcaggatctgctttactccaagtccaccgatttaaatagtcatccgctgggtacggtgcctcaggtctataatcctagccttttgagaagctgaggctggaggattgcttgagcccaggagttcaagaccagcctgggcaatgtggtgagaccctgtctgtagaaaaaatcagaaaaattagttgggcatggtggcatcacgcacctgtagtctcagctcctcaggaagctgaggcaggaagatcacttgagcccaggtgttcaaggctgcagcgagccatgatcacaccaccgtactctagcttggatgacagagtgagaccctgtctcggtaggtaggtaggtaggtaggtaggtaggtaggtaggtaggtaggtagattatagatagatagatagatagatacagacaggcaataatttcatcaaaaaacaccctcacagaaacataataaggataatatttgaccaaatacctgggcactatggcccagccaaggtgacacacaaaattaaccgtcacatcatacagcccagcagttgcatcccttgccatttattccagagcagtgaaaacttttttccgtacaaaaacccttgcatgattgttcatagcagctttatttgtaattgctaacaattggaaaaactaacatgtccgtcagtaggtgagtggttcagcaaagcagtacacatttcctggagcactgctcccacattaaaaaaaaaaaaaaaaaaaaatgaaccattg

SEQ ID NO: 2160 - DNA, 653 bp, Homo sapiens
ccgaagaggagataacatggatagcaaataagcacatgaaaagacgttcagtgtcatgagctactaaagtaatgaattaagatcccttcatacctattagaaaagctgtaatggccggacgcagtggctcacgcctgtaatcccagtacttggaaggctgaggcgggtggatcacaaggtcaggagattgagaccatcctggctaacacggtgaagccccgtctctactaaaaatacaaaaaattagtcgggcgtggtgtcgggtgcctgtagtcccagctacttgggaggctgaggcaggaaaatggcgtgaacctgggaggtggagcttgcagtgagccgagatcacgccactgcactccagcctgggcgacagaacaagactccgtctccaaaaaaaaaaaagctgtaatgaaaaaatagtgacaataccaaatgctggcaaggatgtggagaaactagatccctcatacattgcttgtggaaatgtaaaatgatagagccactgtagaaaatagcttggcagtttcttaaaaaaacaaaacatacgttaagttatatattagcattagttatatattagcattctccagaggaacagaaccaataggatgtgtatgtacatgtatatctaaagagagatgtttttaaag

SEQ ID NO: 2161 - DNA, 312 bp, Homo sapiens
aggtatgtagtgaattgttttgtcagaagccagtcatactcaaccatagctcacaatggagcaagataatattttgcattgttgtgtgactgctttggtctggctctatcaagctctatttaatagtcgactaagtactttaccttcagaatatttcttccttttataaatgagaaataatcatttgaactagaagccatatctgattttcccaaataaaggatagttggagaactcgggttcaaagttatatatatgtctataccgagaaatataattgtttgtgtatttctctcatttttaacgtattta

SEQ ID NO: 2162 - DNA, 312 bp, Homo sapiens; identical to SEQ ID NO: 2161

SEQ ID NO: 2163 - DNA, 312 bp, Homo sapiens; identical to SEQ ID NO: 2161

SEQ ID NO: 2164 - DNA, 5979 bp, Homo sapiens
cggggtggcgggtcggggggagacgcggaatttcccagcgcgggggctctggcttaccctgcaaccgggcagtctctttctgtttacggagagaaaggggaaatggaaaagtcggggaggcggtggctggcgtccgctgcgccgcccctgggcaggctcagacgccgtgagtcaggggcagagcagggcggtctgagcgtgcgggcgacgcgggtctcactcgtccgctccgctctggactgcgcgccacgctctggggtccggcgccctggttcctgcttctgccgctgccgccgccggatcccagtggcccggcgtgctcggctcccacaggcctgcagccagcatcgcaccgaaccttcggggggccgcggctggagcgctcggccggcgtgggagcgccaaggccgcaggtaatccagggttgggggtctccggcgtgtctttcgggtcgcgtcccgcctgggtgccccggggattcccatgcagaaatggagggtgcccccagcagaggggaaaactctggcgtgggaagaggtgggggcgtgcccacagctgcgctcgcgggtcgccggctgcaccaggcacagctggaaagcaccttgcgcaagggtctcacggggtgcagactcgcgactcctcccccttcctcctccttcccgtatccgcagcgccagggcagtgctggtctgggcagtacgcggggaagcggggacccgctgtcactgcgcctcccgctgccgacgccgcctggacggccgcactctccctgcccgagacccggtgagtgcagctcggaggctggaggacccgatcctcccaaatgctgggtgctttgataatttataagccttttaggctcccttgacttagagaaccaggaggaaaggagtgggagtgtgggttggcggagcccaaagacttgtgaatggctgggactaaattcaagtttgtaacccggactctatcccatgactaaagaggtcatagcagaacacgaaggctgggcttttggtctaagaaagaatactaggagaaaaaaaaagttattttcacggaagttgttttcgagcgatagtgcatgatcaggactctgaaatttttctagctctgggcggagaaggacgcctagggattgtctccatagttaacaggggaaggccaccggctgcctgtaagagagaaacgttgcgatgcttgtctatttcacttttgggaagacaagattaaaggctgctcttgataaaaaacagggacagaaaggctcttgcagttgctttacatacctgtggcctgagtcgtttgtgccaaggagagtgtaatccacttccagctgacgcccccagctctctgcgacggattgaggtttgtgtgcaggacgtctggcatacggcccatgaggactttgtcgtgtaaagcaaatgggaacgttgaggcatgtagaggttttgaagcagagtgtcggtccttccttccatacgcctgaaacgcataatccggggctttttgagagcaaaaacatagtcagaaatgtgccctgagggagaatgtactattttggcacacatatgtatatatgtatatataatttttaaattttttttgagagggggtttcactcttgtcgcccaggctggagcgcaatggcgcgatctcggctcactgcaacctccacctcccgggttcaagcgattctcttgcctcagcctcccgagtagctgggattacaggcgcccgccgccacgcccggctaatttttgtagagacagggtttcaccatgttggccaggctggtcttgaactcctgacctcaggtgatgcaccctccttggcctcccaaagtgctgagattacaggcatgagccactgtgcccggcctaaaaaaatattttaaatgagaaataacacaagtaatagtcattctttgttaggcagaagcatatgctgttatgctggccattttcattcacacttgccaggaaacactcacattttgtttctgtatatggaggcagccaagagtattatgttaatgtttaggaagagaatttcctcgtgattttattgctgatttctgaaataattcagtgtaactaattttgactgtatttgcacatctctccaattccaaaagctggcataattttctgtttggttaggaagtaggaattttatgaggacttttattgtaaactgtgtcaagggaaaaatcatcttatactaaacgtctttattgccaaactagaataccttcacaatctgaactttctctagatgggcacagatcatgaataactcagaaaccattagcatattgtgtgcttaattaaggctggaaagtgctgaggctttttgcaggcgcagttagcaggcgaactggtcagcagggtttctggggaacgtagatttgcgtgacaggggccctgtgttgctaaggaattaatgcaggcactgagaaaagtctcagcgtcagacactcctccacctcccgggtcctgcttccctccctctcccctttccaggcaactcacagtttaggggtgtggttgtgtgtgttcaagctcttgggttttacatataaatgcctgagacttttctgcagggtttaaaaactaacatcttgtcttacagctcttttaggatttgtcttttagaatctccagtcctcacaggaaaaccccccaattaaaaaaataaaagaataaagaataaaaagaataccactactactataaaaaaaaaaaaaatcctctaaaatttgtcttcccagatcagcagagtgaatttgaactgtgtggacttttttcctctttctttcttgagtcatgttagtactgagaacttttttttttttctgtcaaatcatctgtttgataaataagtccaggagacttggatcctttcaacccctgaggccctaaattaggctgttttttttttaacctctgtgtttccagtaaattcgacaagcagaaactgcaactaaacggctcagtaaaaccgaagtcaaatgttcctccattaatctaagaagttgctctcctaactcagcagactccaagaacctgaatcacaatctccctcgaagatgtacaagatctcaggaggggaagctgccccctcactctagatttcacggtggtgataacagccatgaaagcatttcataggtttctgccttttttttctctctctttatgtcttgttttagatgcaatcttcttaccgcgaagaagccaggggaataggtagccacatcttgtttgcagataagaaaggaagctaacgcagtatctgcaaagccaggagtctgactcagtacttttctcactcatgcatacaaagcagctaaaaatgacacagcttatttaccatgcccctgacactgcactgagcactttatgagcttgaactctgttaatcctcacgaccacctcatgaggtaggtgctgttattacttccattttacagatggggaaaattgaggtcgagagaggttacgttacttgctcaacgtcatgcaagcagtaaatgggagtgtggggggaggcaatgagatttgactccaagcagtctgagaccagaggaatgttggattgcaggatgctaaactgctttcctcagacacaattcatacgtcagaaaatgaccatcaagtaagtgaatgatgacactaaattgcatggttcttttgtcaaatgaaattcactgagaggcagatggctgggtcatgcgtgcaggtggctctgcagtggagcatttcctggagctttgaaatgaagctccagattgatcagacgtgcgtggctttagccctgagtgtcctgtgtgttaaaggcttgtgcttctcagaacttgaaatacctttcagaaagaggctatgcttttgggagtgcaatcggtgatttaagtaaaccaatgtgccttgaaattctcttagatctcttaggaccttttgtcttttctccttcagaacagagttgttctaaaatcctgagtaacaacgtcagtttttacccttgctttactttctttttctcatctacagatctccaagtgtggcagctgatttgtatataagagctgaaatgcaattttggttaatatagtcacttggacttgcttatgataaatttgactttcctggcttctttctactactcacagcttctagaaggccatttatttatatattaatcttctgggaccctcaagatgtttgctttgcactattaaagaattctggtcctaagggaggacagctgaatcataggttaaatgtatcatcatctttctcatactcatcactgggagaacaaggtttcctgtcatccttccaattagctgtttaactcatttgcataagaatcattcctgaaacttgacctattgccatcaaatttgtgtagattgaaatccatttttccagcttctggctttcagggcctgagttttatttgccaagttagctcctgcatttagtgaagaggttatttttctttaaagtcaccagaggcataaaaaagccatagcgattcttgcagggagggtgccacttcgggggaatagctgggttgtgtaaggttggaagccctaaagagccggtagcctaaggtcttcaaagatttctgagctgctcttgattcgtgtgtatgtttagtgaaagtttgttttcagtgcctgtagctgataccactgactctgtgagtaagagtaagctctctggatctcaggtttccctctgcaaagtgagctggactaaaggttatcttaggtccctttcaactctgcactgtcaacttgaattcatacacacagttgacacagaaccctcgttttctgaacaaaagcatataaaatcctgttgccaatccttgtatgtcagtttcccatgggtcttgaatgcaaatacaaatatcgtaaactaaatatttgtgttttctttcctagactctccagaaagagcaacagtaatggagtacatgagcactggaagtgacaataaagaagagattgatttattaattaaacatttaaatgtgtctgatgtaatagacattatggaaaatctttatgcaagtgaagagccagcagtttatgaacccagtctaatgaccatgtgtcaagacagtaatcaaaacgatgagcgttctaagtctctgctgcttagtggccaaaaggtaccatggttgtcatcagtcaaatacggaactgtggaggatttgcttgcttttgaaaaccatatatccaacactgcaaagcatttttatgttcaacgaccacaggaatatggtattttattaaacatggtacgtttctttccgatcagttgggtgctatgtgctcagctttcctgctgcagcttcatttaatgcagagtggtgtttgaatttggcttagatgggctggcaggcatgattttaaaaaatgtaatcatcagtaagaagtacttccatgttaaagatgcaaaaaaaaaagtcttcattaaaatttctatttattaattcttgatcatattttagtagttttccgcaaataggtaattaagaagaatgtattttggccgggcgcaggggctcacgcctgtaatccgtgcacttggagaggccgaggtgggtggatcacttgaggtcagcaattagagaccagtctggccaacatggtgaaaccccgtctctactaaaaatacaaaattagcctggcatggtggcgggcgcctgtaattccagctacctgggaggctgaggcacgagaatcccttgaacctgggaggtggaggttgtgatgagccgagatcacaccactgcactccagcctgtgtgactgagtgagactctgtctcaacaacaacaaagaagaatgtattttaatttaacagttcactaaaaagtttattcatcagttatgcagaaaagaaaggcttaatgagactccttcgtctgagaggggaataaacactttgtcactaattaatcttg

SEQ ID NO: 2165 - DNA, 5980 bp, Homo sapiens
cggggtggcgggtgggggggagacgcggaatttcccagcgcgggggctctggcttaccctgcaaccgggcagtctctttctgtttacggagagaaaggggaaatggaaaagtcggggaggcggtggctggcgtccgctgcgccgcccctgggcaggctcagacgccgtgagtcaggggcagagcagggcggtctgagcgtgcgggcgacgcgggtctcactcgtccgctccgctctggactgcgcgccacgctctggggtccggcgccctggttcctgcttctgccgctgccgccgccggatcccagtggcccggcgtgctcggctcccacaggcctgcagccagcatcgcaccgaaccttcggggggccgcggctggagcgctcggccggcgtgggaagcgccaagcccgcaggtaatccagggttgggggtctccggcgtgtctttcgggtcgcgtcccgcctgggtgccccggggattcccatgcaaaaatggagggtgcccccagcagaggggaaaactctggcgtgggaagaggtgggggcgtgcccacagctgcgctcgcgggtcgccggctgcaccaggcacagctggaaagcaccttgcgcaagggtctcacggggtgcagactcgcgactcctcccccttcctcctccttcccgtatccgcagcgccagggcagtgctggtctgggcagtgcgcggggaagcggggacccgctgtcactgcgcctcccgctgccgacgccgcctggacggccgcactctccctgcccgagacccggtgagtgcagctcggaggctggaggacccgatcctcccaaatgctgggtgctttgataatttataagccttttaggctcccttgacttagagaaccaggaggaaaggagtgggagtgtgggttggcggagcccagagacttgtgaatggctggaactaaattcaagtttgtaacccggactctatcccatgactaaagaggtcatagcagaacacgaaggctgggcttttggtctaagaaagaatactaggagaaaaaaaaagttattttcacggaagttgttttcgagcgatagtgcatgatcaggactctgaaatttttctagctctgggcggagaaggacgcctagggattgtctccatagttaacaggggaaggccaccggctgcctgtaagagagaaacgttgcgatgcttgtctatttcacttttgggaagacaagattaaaggctgctcttgataaaaaacagggacagaaaggctcttgcagttgctttacatacctgtggcctgagtcgtttgtgccaaggagagtgtaatccacttccagctgacgcccccagctctctgcgacggattgaggtttgtgtgcaggacgtctggcatacggcccatgaggactttgtcgtgtaaagcaaatgggaacgttgaggcatgtagaggttttgaagcagagtgtcggtccttccttccatacgcctgaaacgcataatccggggctttttgagagcaaaaacatagtcagaaatgtgccctgagggagaatgtactattttggcacacatatgtatatatgtatatataatttttaaattttttttgagagggggtttcactcttgtcgcccaggctggagcgcaatggcgcgatctcggctcactgcaacctccacctcccgggttcaagcgattctcttgcctcagcctcccgagtagctgggattacaggcgcccgccgccacgcccggctaatttttgtagagacagggtttcaccatgttggccaggctggtcttgaactcctgacctcaggtgatgcaccctccttggcctcccaaagtgctgagattacaggcatgagccactgtgcccggcctaaaaaaatattttaaatgagaaataacacaagtaatagtcattctttgttaggcagaagcatatgctgttatgctggccattttcattcacacttgccaggaaacactcacattttgtttctgtatatggaggcagccaagagtattatgttaatgtttaggaagagaatttcctcgtgattttattgctgatttctgaaataattcagtgtaactaattttgactgtatttgcacatctctccaattccaaaagctggcataattttctgtttggttaggaagtaggaattttatgaggacttttattgtaaactgtgtcaagggaaaaatcatcttatactaaacgtctttattgccaaactagaataccttcacaatctgaactttctctagatgggcacagatcatgaataactcagaaaccattagcatattgtgtgcttaattaaggctggaaagtgctgaggctttttgcaggcgcagttagcaggcgaactggtcagcagggtttctggggaacgtagatttgcgtgacaggggccctgtgttgctaaggaattactgcaggcactgagaaaagtctcagcgtcagacactcctccacctcccgggtcctgcttccctccctctcccctttccaggcaactcacagtttaggggtgtggttgtgtgtgttcaagctcttgggttttacatataaatgcctgagacttttctgcagggtttaaaaactaacatcttgtcttacagctcttttaggatttgtcttttagaatctccagtcctcacaggaaaaccccccaattaaaaaaataaaagaataaagaataaaaagaataccactactactataaaaaaaaaaaaaatcctctaaaatttgtcttcccagatcagcagagtgaatttgaactgtgtggacttttttcctctttctttcttgagtcatgttagtactgagaactttttttttttctgtcaaatcatctgtttgataaataagtccaggagacttggatcctttcaacccctgaggccctaaattaggctgttttttttttaacctctgtgtttccagtaaattcgacaagcagaaactgcaactaaacggctcagtaaaaccgaagtcaaatgttcctccattaatctaagaagttgctctcctaactcagcagactccaagaacctgaatcacaatctccctcgaagatgtacaagatctcaggaggggaagctgccccctcactctagatttcacggtggtgataacagccatgaaagcatttcataggtttctgccttttttttctctctctttatgtcttgttttagatgcaatcttcttaccgcgaagaagccaggggaataggtagccacatcttgtttgcagataagaaaggaagctaacgcagtatctgcaaagccaggagtctgactcagtacttttctcactcatgcatacaaagcagctaaaaatgacacagcttatttaccatgcccctgacactgcactgagcactttatgagcttgaactctgttaatcctcacgaccacctcatgaggtaggtgctgttattacttccattttacagatggggaaaattgaggtcgagagaggttacgttacttgctcaacgtcatgcaagcagtaaatgggagtgtggggggaggcaatgagatttgactccaagcagtctgagaccagaggaatgttggattgcaggatgctaaactgctttcctcagacacaattcatacgtcagaaaatgaccatcaagtaagtgaatgatgacactaaattgcatggttcttttgtcaaatgaaattcactgagaggcagatggctgggtcatgcgtgcaggtggctctgcagtggagcatttcctggagctttgaaatgaagctccagattgatcagacgtgcgtggctttagccctgagtgtcctgtgtgttaaaggcttgtgcttctcagaacttgaaatacctttcagaaagaggctatgcttttgggagtgcaatcggtgatttaagtaaaccaatgtgccttgaaattctcttagatctcttagggccttttgtcttttctccttcagaacagagttgttctaaaatcctgagtaacaacgtcagtttttacccttgctttactttctttttctcatctacagatctccaagtgtggcagctgatttgtatataagagctgaaatgcaattttggttaatatagtcacttggacttgcttatgataaatttgactttcctggcttctttctactactcacagcttctagaaggccatttatttagatattaatcttctgggaccctcaagatgtttgctttgcactattaaagaattctggtcctaagggaggacagctgaatcataggttaaatgtatcatcatctttctcatactcatcactgggagaacaaggtttcctgtcatccttccaattagctgtttaactcatttgcataagaatcattcctgaaacttgacctattgccatcaaatttgtgtagattgaaatccatttttccagcttctggctttcagggcctgagttttatttgccaagttagctcctgcatttagtgaagaggttatttttctttaaagtcaccagaggcataaaaaagccatagcgattcttgcagggagggtgccacttcgggggaatagctgggttgtgtaaggttggaagccctaaagagccggtagcctaaggtcttcaaagatttctgagctgctcttgattcgtgtgtatgtttagtgaaagtttgttttcagtgcctgtagctgataccactgactctgtgagtaagagtaagctctctggatctcaggtttccctctgcaaagtgagctggactaaaggttatcttaggtccctttcaactctgcactgtcaacttgaattcatacacacagttgacacagaaccctcgttttctgaacaaaagcatataaaatcctgttgccaatccttgtatgtcagtttcccatgggtcttgaatgcaaatacaaatatcgtaaactaaatatttgtgttttctttcctagactctccagaaagagcaacagtaatggagtacatgagcactggaagtgacaataaagaagagattgatttattaattaaacatttaaatgtgtctgatgtaatagacattatggaaaatctttatgcaagtgaagagccagcagtttatgaacccagtctaatgaccatgtgtcaagacagtaatcaaaacgatgagcgttctaagtctctgctgcttagtggccaagaggtaccatggttgtcatcagtcagatatggaactgtggaggatttgcttgcttttgcaaaccatatatccaacactgcaaagcatttttatggacaacgaccacaggaatctggaattttattaaacatggtacgtttctttccgatcagttgggtgctatgtgctcagctttcctactgcagcttcatttaatgcagagtggtgtttgaatttggcttagatgggctggcaggcatgattttaaaaaatgtaatcatcagtaagaagtacttccatgttaaagatgcaaaaaaaaaagtcttcattaaaatttctatttaaagattcttgatcatattttagtagtatttctacaaataggtaattaagaagaatgtattttggccgggtgcaggggctcacgcctgtaatccgcgcacttggagaggccgaggtgggtggatcacttgaggtcagcaattagagaccagtctggccaacatggtgaaaccccgtctctactaaaaatacaaaattagcctggcatggtggcgggtgcctgtaattccagctacctgggaggctgaggcacgagaatcccttgaacctgggaggtggaggttgtgatgagccgagatcacaccactgcactccagcctgtgtgactgagtgagactctgtctcaacaacaacaaagaagaatgtattttaatttaacagttcactaaaaagtttattcatcagttatgcagaaaagaaaggcttaatgagactccttcgtctgagaggggaataaacactttgtcactaattaatcttg

SEQ ID NO: 2166 - DNA, 5979 bp, Homo sapiens
cggggtggcgggtgggggggagacgcggaatttcccagcgcgggggctctggcttaccctgcaaccgggcagtctctttctgtttacggagagaaaggggaaatggaaaagtcggggaggcggtggctggcgtccgctgcgccgcccctgggcaggctcagacgccgtgagtcaggggcagagcagggcggtctgagcgtgcgggcgacgcgggtctcactcgtccgctccgctctggactgcgcgccacgctctggggtccggcgccctggttcctgcttctgccgctgccgccgccggatcccagtggcccggcgtgctcggctcccacaggcctgcagccagcatcgcaccgaaccttcggggggccgcggctggagcgctcggccggcgtgggagcgccaaggccgcaggtaatccagggttgggggtctccggcgtgtctttcgggtcgcgtcccgcctgggtgccccggggattcccatgcagaaatggagggtgcccccagcagaggggaaaactctggcgtgggaagaggtgggggcgtgcccacagctgcgctcgcgggtcgccggctgcaccaggcacagctggaaagcaccttgcgcaagggtctcacggggtgcagactcgcgactcctcccccttcctcctccttcccgtatccgcagcgccagggcagtgctggtctgggcagtgcgcggggaagcggggacccgctgtcactgcgcctcccgctgccgacgccgcctggacggccgcactctccctgcccgagacccggtgagtgcagctcggaggctggaggacccgatcctcccaaatgctgggtgctttgataatttataagccttttaggctcccttgacttagagaaccaggaggaaaggagtgggagtgtgggttggcggagcccagagacttgtgaatggctggaactaaattcaagtttgtaacccggactctatcccatgactaaagaggtcatagcagaacacgaaggctgggcttttggtctaagaaagaatactaggagaaaaaaaaagttattttcacggaagttgttttcgagcgatagtgcatgatcaggactctgaaatttttctagctctgggcggagaaggacgcctagggattgtctccatagttaacaggggaaggccaccggctgcctgtaagagagaaacgttgcgatgcttgtctatttcacttttgggaagacaagattaaaggctgctcttgataaaaaacagggacagaaaggctcttgcagttgctttacatacctgtggcctgagtcgtttgtgccaaggagagtgtaatccacttccagctgacgcccccagctctctgcgacggattgaggtttgtgtgcaggacgtctggcatacggcccatgaggactttgtcgtgtaaagcaaatgggaacgttgaggcatgtagaggttttgaagcagagtgtcggtccttccttccatacgcctgaaacgcataatccggggctttttgagagcaaaaacatagtcagaaatgtgccctgagggagaatgtactattttggcacacatatgtatatatgtatatataatttttaaattttttttgagagggggtttcactcttgtcgcccaggctggagcgcaatggcgcgatctcggctcactgcaacctccacctcccgggttcaagcgattctcttgcctcagcctcccgagtagctgggattacaggcgcccgccgccacgcccggctaatttttgtagagacagggtttcaccatgttggccaggctggtcttgaactcctgacctcaggtgatgcaccctccttggcctcccaaagtgctgagattacaggcatgagccactgtgcccggcctaaaaaaatattttaaatgagaaataacacaagtaatagtcattctttgttaggcagaagcatatgctgttatgctggccattttcattcacacttgccaggaaacactcacattttgtttctgtatatggaggcagccaagagtattatgttaatgtttaggaagagaatttcctcgtgattttattgctgatttctgaaataattcagtgtaactaattttgactgtatttgcacatctctccaattccaaaagctggcataattttctgtttggttaggaagtaggaattttatgaggacttttattgtaaactgtgtcaagggaaaaatcatcttatactaaacgtctttattgccaaactagaataccttcacaatctgaactttctctagatgggcacagatcatgaataactcagaaaccattagcatattgtgtgcttaattaaggctggaaagtgctgaggctttttgcaggcgcagttagcaggcgaactggtcagcagggtttctggggaacgtagatttgcgtgacaggggccctgtgttgctaaggaattactgcaggcactgagaaaagtctcagcgtcagacactcctccacctcccgggtcctgcttccctccctctcccctttccaggcaactcacagtttaggggtgtggttgtgtgtgttcaagctcttgggttttacatataaatgcctgagacttttctgcagggtttaaaaactaacatcttgtcttacagctcttttaggatttgtcttttagaatctccagtcctcacaggaaaaccccccaattaaaaaaataaaagaataaagaataaaaagaataccactactactataaaaaaaaaaaaaatcctctaaaatttgtcttcccagatcagcagagtgaatttgaactgtgtggacttttttcctctttctttcttgagtcatgttagtactgagaactttttttttttctgtcaaatcatctgtttgataaataagtccaggagacttggatcctttcaacccctgaggccctaaattaggctgttttttttttaacctctgtgtttccagtaaattcgacaagcagaaactgcaactaaacggctcagtaaaaccgaagtcaaatgttcctccattaatctaagaagttgctctcctaactcagcagactccaagaacctgaatcacaatctccctcgaagatgtacaagatctcaggaggggaagctgccccctcactctagatttcacggtggtgataacagccatgaaagcatttcataggtttctgccttttttttctctctctttatgtcttgttttagatgcaatcttcttaccgcgaagaagccaggggaataggtagccacatcttgtttgcagataagaaaggaagctaacgcagtatctgcaaagccaggagtctgactcagtacttttctcactcatgcatacaaagcagctaaaaatgacacagcttatttaccatgcccctgacactgcactgagcactttatgagcttgaactctgttaatcctcacgaccacctcatgaggtaggtgctgttattacttccattttacagatggggaaaattgaggtcgagagaggttacgttacttgctcaacgtcatgcaagcagtaaatgggagtgtggggggaggcaatgagatttgactccaagcagtctgagaccagaggaatgttggattgcaggatgctaaactgctttcctcagacacaattcatacgtcagaaaatgaccatcaagtaagtgaatgatgacactaaattgcatggttcttttgtcaaatgaaattcactgagaggcagatggctgggtcatgcgtgcaggtggctctgcagtggagcatttcctggagctttgaaatgaagctccagattgatcagacgtgcgtggctttagccctgagtgtcctgtgtgttaaaggcttgtgcttctcagaacttgaaatacctttcagaaagaggctatgcttttgggagtgcaatcggtgatttaagtaaaccaatgtgccttgaaattctcttagatctcttagggccttttgtcttttctccttcagaacagagttgttctaaaatcctgagtaacaacgtcagtttttacccttgctttactttctttttctcatctacagatctccaagtgtggcagctgatttgtatataagagctgaaatgcaattttggttaatatagtcacttggacttgcttatgataaatttgactttcctggcttctttctactactcacagcttctagaaggccatttatttagatattaatcttctgggaccctcaagatgtttgctttgcactattaaagaattctggtcctaagggaggacagctgaatcataggttaaatgtatcatcatctttctcatactcatcactgggagaacaaggtttcctgtcatccttccaattagctgtttaactcatttgcataagaatcattcctgaaacttgacctattgccatcaaatttgtgtagattgaaatccatttttccagcttctggctttcagggcctgagttttatttgccaagttagctcctgcatttagtgaagaggttatttttctttaaagtcaccagaggcataaaaaagccatagcgattcttgcagggagggtgccacttcgggggaatagctgggttgtgtaaggttggaagccctaaagagccggtagcctaaggtcttcaaagatttctgagctgctcttgattcgtgtgtatgtttagtgaaagtttgttttcagtgcctgtagctgataccactgactctgtgagtaagagtaagctctctggatctcaggtttccctctgcaaagtgagctggactaaaggttatcttaggtccctttcaactctgcactgtcaacttgaattcatacacacagttgacacagaaccctcgttttctgaacaaaagcatataaaatcctgttgccaatccttgtatgtcagtttcccatgggtcttgaatgcaaatacaaatatcgtaaactaaatatttgtgttttctttcctagactctccagaaagagcaacagtaatggagtacatgagcactggaagtgacaataaagaagagattgatttattaattaaacatttaaatgtgtctgatgtaatagacattatggaaaatctttatgcaagtgaagagccagcagtttatgaacccagtctaatgaccatgtgtcaagacagtaatcaaaacgatgagcgttctaagtctctgctgcttagtggccaagaggtaccatggttgtcatcagtcagatatggaactgtggaggatttgcttgcttttgcaaaccatatatccaacactgcaaagcatttttatggacaacgaccacaggaatctggaattttattaaacatggtacgtttctttccgatcagttgggtgctatgtgctcagctttcctactgcagcttcatttaatgcagagtggtgtttgaatttggcttagatgggctggcaggcatgattttaaaaaatgtaatcatcagtaagaagtacttccatgttaaagatgcaaaaaaaaaagtcttcattaaaatttctatttaaagattcttgatcatattttagtagtatttctacaaataggtaattaagaagaatgtattttggccgggtgcaggggctcacgcctgtaatccgcgcacttggagaggccgaggtgggtggatcacttgaggtcagcaattagagaccagtctggccaacatggtgaaaccccgtctctactaaaaatacaaaattagcctggcatggtggcgggtgcctgtaattccagctacctgggaggctgaggcacgagaatcccttgaacctgggaggtggaggttgtgatgagccgagatcacaccactgcactccagcctgtgtgactgagtgagactctgtctcaacaacaacaaagaagaatgtattttaatttaacagttcactaaaaagtttattcatcagttatgcagaaaagaaaggcttaatgagactccttcgtctgagaggggaataaacactttgtcactaattaatcttg

SEQ ID NO: 2167 - DNA, 3824 bp, Homo sapiens
tagggacttcctttccccaaattaaaactcattttgaggtgtttggttttgtcttttaatttttgcaacttcaaaattgatgactcagttctagtgtactttatcctcgaacttgtttaaaataggttactttcttgaaataaataataatataatgaagagatcatgacttggatttgggtgggggaattaaataccttttcaaaattgccatcagtatcatcttggatgaagaaagttcagtggttaaaagcgtcttctgaagtgtggtcatagtcggtgaggtttatttcagtttggcttctcattttaattttcagatgtatatcacatatatgtgaaaagtactgacaaaaataatttatgaaataaacacagtagggcatgaggttgtgttatttgtgaggcagcaatggagcatgacttgtagtcaacaaacatgggtgtcctgatcaaagctctgctgtgctattcggcaagactctatgtggatgcctcttgtagaatgtggttaataataccagccgatctcatagggcactgtgcagactcagcattatggtgcacagctccttgaactcataggagtggcacttaactggagctttgtgtcgtactcatcaaacatcttcccccagacaatgattcttctgattctgctaactctggacagagtttgcattgtcttttgagaaaaatgaatgtatcacttagtcaaaaaactgtaaaaatacataggctctttccgatgcttgctttctcagagccctatgagtttgtctctctggaatggctgcaaaagtggttggatgaatcaacacctaccaaacctattgataatcacgcttgcctgtgttcccatgacaagcttcacccggataaaatatcaattatgaagaggatatctgaatatgcagctgacattttctatagtagatatggaggaggtccaagactaactggtaattcaagatgtcctctctgtttaaaaaagagcagctcattaaatcttcatcttatggtctttatgagtgtggcttatgatgatttgacccaaactatgctagaccaaatattccttacactttgcacaaaggatttgctaaataaagtagaagttaagcaactgatgctattcatagagggttggttggggttttttggtttgtttttttggtttgtttcttttaacccctctcaaagcagacaaaataggacccttttaagaaaactgtctggtagtagtttgttactctgtgtaatactgtttaaggtacttgagcccttgtctggttaattgcaagtttgtgcctccatgttatggtgacttctttttttttttttttgagatggagtctcactctgttacccaggctggcgtgcagtggctcaatctcgactcactgcaaccttcgcctcctgggttcaagtgattctcgagcctcccgagtagctgagattacaggtgcgcaccaccatgcccagctaatttttgtatttttagtagagacggggtttcactgtgttgcccaggctggtctcaaactcctgggctcaagtgatccactcaacctcgccctcccaaagtgctgggattacaggcaagagccaccacacccgcccagctatggtgacttctaacagtgtgtgagctgtagatggttacttagtttatgaatggaagctacttgattctcccttaaatatagagctatatatgaccacatagtacccaaccatagtattttgttttggctgcctttctgttgtgcctccttgaaacatttttctttttacatgagtagctgccaacacaatcctccctccaattttcagatgaggctgtaggaaattacatgacacctccctccccaatacactttttctgtaattaagtgctgttttctaatggtatacaacttattgcataaaacttgatatttaactacatgctgcaggccttctgttaaacacgactggagttttgcttcctaaatttctgggaatttttgtttttgtttttttgagacagtgtctcactctgttgcccaggctggagtgcagtggtgcaatcacagctcactgcagcttcaacctcctcaggctcccgtctcagtcttccaagtagctgggaccacagacatgcaccaccatgcctggttaagttttgtattttctgtagagatggtgtttcatcatgttgcccaggctggtcttgaactcctaggctcaagtgattgacctgcctcggcctcccaaagtgctgggattacaagaatgggccaccatatctggcccctgttttttttttttttttctctgagacagagtcttattctgttgccccagctggagtacagtggtggaatcgtagtgcactacagcctagaacttctaggcttaagcagtcctcccacctcagcttcccaagtagctaggactacaggcacacatcaccatggcttgctaatttttacactttttgtagagacagggtctcactatgttgcccaggctggtctcaaactcctgtcctcaagctaccctccctgcttggcttcccaaagctcttggtggtatgagccactatacctgccactgttcttaattcacaatgaataaaccatgcaataggaagagcgttcacattttagatgattcctaaaacttctttgtgttttaaaccaggcccttcattttgcttttccttttagtgtgctttgaagatcactttcacatgaagatcattatttataattatcagctatatttaacccccccaccttagaacctcagtgatttgattatcatcttgtaaagattgcatgtaaaccttgtcagatactgtatttagatacttttaatgtaatacaacattttgtctctcattgttctttattcagataacagtattgccgtcttggtttctaattgtcttagtaaaataatttagggtatataccaatttgccatattgccaacatttgtgactttggtttagaatgtgtctgtgtttgtgaagtgctgaaaacattttcctaacaggaagtctgtttgaatgaaatatatttcctttcattctttcttgcctgtagtgaaagccctgtgtaaggaatgtgtagtagaacgttgtcgcatattgcgtctgaagaaccaactaaatgaagattataaaactgttaataatctgctgaaagcagcagtaaaggggtatgttgcacagtgtacattgttaatgataaactaagaagttttcaagaggtcataaccaagcatctcgttatttattaaaaataggaagttgggatttttagaagaagggtgataaagtggatggtagagccagatcaaaagtaaattttgcaatgactgcccctgtggcaacgataaagaaaactgctgagtcagatagcctttgccactgtattccatcctaccatttgattggtgtgattggcttgaaggtaggaaaagcaggataatatttagaatggaaacaaaatattagatccctgcagttcaatagtgaacagagaaaatgaccgaaattaggaagtgggttaaaatcaattacatgtacagtagctgatgttgagtgtttgtaattcactttagttgtttttacaggcaaagaagggaggacagtgtttggaaatattacttatatgatttaacattctctctgttccacagcagcgatggattttgggtggggaagtcctccttgcggagttggcgccagctagctcttgaacagctggatgagcaagatggtgatgcagaacaaagcaacggaaagatgaacggtagcaccttaaataaag

SEQ ID NO: 2168 - DNA, 391 bp, Homo sapiens
cagacgggcagatcacttgagcccagcggttgtgccagccccactgcactccagtctgggtaacagagtgagaccctgtttccctaaaaaacaattttagtctgggtgcggtggttcatgcctataatcccagcactttaggaggccgaggcaggttgatcacttgaggtcaggtgttcaagaccagcctgagcaacatggtgaaaccccgtctctactaaaaatacaaaaataattagccaggagtggtgttgcacacctgtggtcccagctactcgggaggctgaggcagtagaatcgattgaacccaggagttgtaggttaccatgacccaagattgcgccactacactgcagcttgggcggcagagcgagactctgtctcttaaaaa

SEQ ID NO: 2169 - DNA, 425 bp, Homo sapiens
tcttgcatattgcacattcttcttatacttcctccctacctttatctgacacagaaatgctgtatgtccagaacttctatcagaggcacctatggaagtctaagggaagaccacatcgcttttaaaaaccctaaaattttgtagtcactagatgaaaatattcagccagtgacccaaaaaattgctaccaatgagactctccattttgccatgtagccagaacttactttgatctatgtgcctggggtagtgaccaagtaggtgggtaggagtaatctcagggaaacttgaggccccagcctcatggctagggtcataatttgaacccaggtctgtctgacatcagaatccatgatgttaaccccaattctaaggggttcaactaccctttctaaatggaatcctgctatattaagcactattta

SEQ ID NO: 2170 - DNA, 17581 bp, Homo sapiens
atctcccttgagtttagaaatctggctgagaaataccaaacagtgattgccgacatttgccggagaatgggcattgggatggcagagtttttggataagcatgtgacctctgaacaggagtgggacaaggttagtctcataaaacagtgtctgtgtgtgatgtattagacagagctggcagtcctcatagtgaagctcagaacaagaaaagttgtccagtattttcagcccctctggttttacaattcatctgtttaggttgaatgtctcatcataaacagtttattccagagttaattccaaaccagcagctatgtaggatatcagccaggctaggagtagggtactggagagaagtgcttatctagacaaagggatgtaattgaccatgaagattaaaactacacatcaaaacataaggtagggttaggagtcttgcctatttttcataggaatggtgtttgtgagacttactcatcacttctgtggaagtaaagacattttatttatttattttaaagccagtcagatttagcaggcagagacatttcagacatctaaagtgttgatgtatttcatacctttaactgtgcttaaattaggatctccgaaaagatgctgctacatggtcactacgttagtgtaggtccaaggtcttgggcctcttaatttttcaaacctcaaaacttgacagcagttatctttggaactgctgatttgtgcttcctaagttaacagcatacaatgattgctagaaatcaatttctgcatttaaggtgaagttagccgggtactatggtttacctgtaatctcagcactttgggaggctgaggtgggaggatcatttgagcccaggagttagacacaagcctaagcaacatagcgagaccccgtctttcaaaaaattaaaaaatgagcagggaattggtggcatgtgcctgtggtcccagctactctggaggctgaggtgtgggaggattgcttgagcccaagagttgaaggttgcagtgagccatgattgtgccactgcactccaacgtgggtgacagagcaagacaccatctgaaagaaaataaagttgaagttaaaacttctggccaagaaccagcactggttatgatagtaactcattttctgttgtgcagatttattcaggaaacttaattttaggttgttgaatagaagttttgatcagataaaattgaattaaaaaaaattttttttgagacagggtcttgctgttatccaggctggtgtgtagtggtgtgatcacggctccccgcagcctcaacctcctgggctcaggtgatcctcccacctcagcctaccgagtagctgtaactacagtgcatgacaccataccaggctcatttttgtacattttttgtagagagagggttttgccatgttgcccaggctagtctcaaactcctggcatcaaacagtcctcccactctggcctctcaaatgttgggattacaggcatgaccagccaattatttcaaggagttattttttttcttctactttgggggaagatgaattatataagtctccattttaggagtatttctaccaaaagaactattatcttcaaatatatttttggatagtactatagatatactaatttttttttaaatttctagtaattcttttgaagattttgtatagctgtccaaagccaatttctgtctacctaatttcagcaagatttcactcttttcatgttacttttgtcccagaacaaatttcaagtgctttctcttcacctgtgcattcttccccctgattagtctctggctttgtattactttcagtcagagacgactttttttttttgagacagggtctcactctgtcacccagactggaatgcagtggcacagacaaggcagccttgaccttctgggctcaagcaatcttccttgccctcagcctcctgagtaactgggaccacaggcacgttgccaccatgcctggctagtttattttaatttttattatttttgagacagggtattgctctgtcacccaggctggagtgtagtggcatgatcaaggctcactgcagccttcacctcctgtgctcaagcagtcctctcacctcagcctccccattagctgggactataggtccacaccactacaccaggctaatttttgtaattttttggtagagacagggtttcatcgtgttgcctaggctggtcttgagctcctgggctcaagcgattcacctgccttagcctcccaggtgtgagccactacactcagccttttaaaattttttacagagatgaggtcttgctttgttggccaggctggtctaaaactcttgggctcaagcagtcccctctccacagcctcccaaaattccgggattacaggcgtgaacttcggtcatttcctaacttttacccttcctaatgacactccagagcttaccttctttacttttgcttcttaagttaactaatagacaattattgtatgtggatattgcattaagttgtcttaggatacccttttcagaggaggacagcttttgacaaattgctgtcgcggaaaaaaaaagtatttggcaattaagagttgcatttactgaaatctctgttgagagaggggaagttacgttgtctctaaaagaaaaactaaaaagaaaaggggaagttttagcaaagttgttaaagcctgacacttaagtcatactacctagttttgaactcttagcccctgccacagacacggcagccccttgaaccttcctgggttcaagcgagcctcctacttcagccccctgagtaactgggaccactggcctgtgtcactgtgcctggctaattttttttttttcctcacatgggcaatgttgggcaagttaaatcgacttctttgtgcctcagtttcctcatctgaaatggagatcatactgctatgtacctgatacaatgtttgtgaggattgaatgtgcagagttctttttttctgttgttgttgttttgagacggagtctcactctgtcgcccaggctggagtgcagtggcgcgatctcggctccctgcaagctccacctcctgggttcacgccattctcctgccttagccttctgagtagctgggactacaggcacccgccaccaggccagctaatttttttgtatttttagtagagacggggtttcaccgtgttagccaggatggtcttgatctcctgacctcgtgatccgcccgtctcagcttcccaaagtgctgggattacaggcatgagccatcgtgcccggctgaatgtgcagagttcttaaaacagtgtcaagaacataaaatagttatttgttctttcatataatgatgattttgagggcctgcggatcttgacatgttatcagattggtcaaaaaaagattaaaccatagttggtattgtcctagttcctgttaccagaatattccatctttcatcgttgccttctctcatagttttatgtatcaaaaagtttattgtaaagctaggccgggcacggtgtcttgggctggtaatcccagcactttgggaggccaaggctggcagatcagttgaggtcaggagttcgagaccagcgtggccaacatggtgaaaccccgtctctactaaaaataaaaaattagctggatgtggtggtgggtgctttaattccagctactcaggaagctgaggcaggagaatcacttgaacccaagaggcagaggttgcagtgagttgagattgtgccactgcactccagcccaggggacaaagtgagacttgatctcaaaaaaaaaaaaaaaaaaaagttattgtaaagctagacacggtggtatttgcctacaatcccagctgttcgggaagctgaggcagaaagattgcttgggtccagtagtttgagtctaacgtgggcaaatatatgagactccatctcaaaaaaaaaaataaaaaataaaaataaaaaaatgtttactagtttttttcagtagccttttattatagtagcagtacatgtgtattgtagaaatttggaaaatacaagtgaaaaataaaaacatcaaattcccgtcagccagagactgctgtgaaatgttttgagcacatccttcttgaatgttttttaaatcctggtatgtatatttgtattttaaaatcaaaatgcattcttacccattctcttttgaacctgcttttttgtagctaatgatctctagtgtgtccatttcagtaaaaattccattattaaagtgctttaaaaatcgtctcttacagtactgccactatgttgctgggctggtcggaattggcctttcccgtcttttctcagcctcagagtttgaagaccccttagttggtgaagatacagaacgtgccaactctatgggcctgtttctgcagaaaacaaacatcatccgtgactatctggaagaccagcaaggaggaagagagttctggcctcaagaggtaacagattcagggtattttgggggaaaataactttagacattctctgaaaaatcctttaactcttgtggttgcgggtgacagaaaaacaagtcaggcctcccccaggcagcataaggggatgtggaaaataggatagattgacatgagtttgcttcaggtagactggctgactcccaggattcacaccacgtaatcagtatattcaagccttgctgtccttgatttctttcagacggtctttctccaagtggtggatatggtaacaacccatgtgcactagcttaacaaaaagttcttaggaatggctttgttcggcctggcgcagtggctcatgcctgtaatcccaacagtttgagaggccaaggtgggcggatcacctgaggccaggagttcgagaccagcctggccaacatagtgaaaccccgtgtttactaaaaaatacaaaaattagccgggcgtggtggcaagggcttgtaatcccagctacctgggaggctgaggcaggagaatcgcttgaacccaggaagcagagattgcggtgagctcagattgtgccactgcactccagcctgggcgacagagtgagactccctctcaaaagaagaggaagggcttggttcttctgctcagccctgaatcagttactgttgctacacagctgagttctctggcctcacctggattacgtctacacagtacacacagaatggatttcccccaaagaaagaattctgcggcaggaaggggaaagggatggcaggtagacaaaaactccaggtgtctgtaataagggacagggtcgatctttaattaaaacatggacagggaacagaaagcttttgatactgattttgttcagaaggaaagtagaaaattttatgactgttccctgaatttattccagcatttaccttttgctttccataaaagtgtttcctgcagccaagtactttaaagttttaaaaagacgggtgaggctaagtgtggtgtctcatacttataatcccagtgctgaggccaggagttcaagaccagcctgagcaacacagcaagataccatctctataaaaaattgttagaaaatgattctgctgaaagagcaaaaataaaaattaaagaaagtagaaaaaataaaactaaatttaaaagattaactgggcatgttggcatgcacctgtattcctaggtattcgggaggctaaggcacaaggatcccttgagcgcaggagctcaaggttggattgagttgtaatcacaccactgcactccagcctcggtggcagaatgaaactgtctcaagaaaaaaaaaaagtgacagagggaaacaatatttgcaattcatagagcagatacagggttcatattcctaatattaaaaaaaacttctaaaagttaagaaaaaggccaactgccccacagaaaaatgggcaaggagataagaacaagattgttcacaggaagagacacacagatgattattaaaaatctgaaaagatgctgagtcttactcctaagaaaaattcacatttaaactactctgggggctgggcaaggtggctcacgcctgtaatctcaacactgggagaccaaggcaggaagatcactgaagccagggtatcgagaccagcctggacaacgtagtgagaccttatctcttaaaacaaaacaaaacaaaacaaaaaaaaaaaaacagtaaaaattggccgggcacagtgactcctgcctgtaatcccagcactttgggaagcccaggtgagtggatcacttgaggtcaggtgtttgagaacagcctggccaacatggcaaaactccgtctctactaaaattacaaaaattagccaagtgtggtggcatacgctggtagggccagctacttgggaggctgatgtgagactccatttaaaaaaaaaaaatcaaaaattagctgggtatagtggcacacccctatagttctcgctccttgggaggttgaggcaggaggattgcctgagcccaggagttcaaggctgcagtgaaccatgatcacaccactgcattctagcagcctgggagacagagcaaaacccttgtctcaaaacaaacaacaacaaaaaaacaaaaaacacttccctcagctcagacatggccttttaagtttcctaggtgactcgtgtgcagccagggttgagaaaccactcttgtcttacccctcttttgcagacacagggctcagagaagggaaggggattgtctggggatgtatagtgaggcagtggctgccttgaaagtggagtctcagtctcccggctcctaggccagcccctgaccactgttccattgtctcccagacagaacatcagccacgggcatgtgatgcatgagcgtgagccacaccatcttgcacacacaggagcagagccctgctcttctcattcacttactttatctgtaaaatagcatcatttctaccacacggtggtggtgtgaataaaatgagatgaacttctagcatagagtgcttagtaaaggttctggacatttcgtagtagttgaatcatgccaaatgtggtcctaggtgattggcttcttttgctagcatgttttcagggctcctccatgctggggcattgcatcactgctttattcctttttatcgcctagtattattccactgtgtggatagaccacatttatccattcatcagttggaggatatttgggttcttcccattttttttggctatggtgaatagtactgtgtacatttgcatataaggttttgtgtagatgtgtgttttcctttttcttgggtctatgctgagaagtggaattgctggttcatacagcagctcgaaccttgtgaggagctgccagacgcttttccaaggtcgctccaccattttacattcccgtcagcagtgtgagagtcccagtttcaccagcacttgttgttatctctttttaactgtatgtatatatacttaacattttatttataataaatgtacataatagagaatttgccattttaactatttttaagtctattattcagtggcattaagtacattaatgatgttatataaccatcaacactatgtttccagaactttcgctagcttcagagaatcctctaaataatatcattaaaaatcatcaagccgaatcccactgttagaattaaaggttttatttcactttcaagttatcaggatccagggaggtgtaatacacttagaggatagactcagctcatttcccagctatgcctttcagcagcattcttaccagagtaggaatataatgttagtcattatttagaggcctggccatcttgagaaggtttactgtttagtctgcagtacaattataactgtttttgtatattgggttatttttttcagaagtaggccagtagctctaacaggagcctctttagcctgaattcgtccaagtagtgcagtgttgcactagttgtccctcgggacatgctccccaatacgtaactcacttccaggttgcaactggacacttactggtagtcagaaatagctattgcatggagcttaaaatgaacttgatcttcgtgaaagatgagtctgcagctaagagactttactgtatatcatagtgtttttttttgttttgttttgtttttgtttttgtgacggagtctcactctttcacccaggctggagtgcaatggcgagatcttgactcactgcaacctccgccccctaggttcaagcaattcttctgtctcaccctcctgagtagctgggattacaggcgcctgccaccgtacccggctagtttttgtatttttagtagacacagggtttcaccaccttggccaggctggtcttgaactcctgacctcgtgatccaccctcctcggcctcccaaagtgctgggattacaggcgtgagccacggcgcccagcctgtatcatagttcttatgcacaaagaccctttaatattgtttgtaaattctcccctatgcacacgctgacctgttccttaatcttcttatctgtctaggtttggagcaggtatgttaagaagttaggggattttgctaagccggagaatattgacttggccgtgcagtgcctgaatgaacttataaccaatgcactgcaccacatcccagatgtcatcacctacctttcgagactcagaaaccagagtgtgtttaacttctgtgctattccacaggtagggaacggggctcctctgggtggatacggggctaaagggagtggggtaggagtaagggtggattttgctgtgctatattcaaggatatgattccttaaaaagacgatgactccagtttattacgctgggagtttcatagcacccgcctttgcttccagccaccaaactcagctcagccttgaggttaagcctgctccttttcagaaccttctttctggatttactattttctacagctatcctaaactagttaggttcttttcctcacagttaagtcaaggtctttggcttagatttatggggagtgctgggtaaaacctgggtgaagctgttatcattaaaaagtcttcattaagcacctaattactgctgtccttttcctagacccggcataaaaagaacctggtccggtagacctagcctctcagtatgctaggaacttacactttttagttgcctttaccaagtattgcagatactactgcaaataagtgaagaaagtaacagcatttaactgatttgggaacttggtttgatcttgttctaatgacccacttcgaatggtggttgaaagtaaaatctgtatcgccgtcttatgtttccatttacctagaaatactttacctttgagcacaggaaattaatccccttctggttgttctccccctggcattggttttaaatatataatgattatgtttgttgtaggaaaaatagaaaaacaactacaatagaaaattcttcccatatattattttgaaatacatatttccgatccgataatccattgctctagcatggaaaatgttggatttacttgtgtttgctttttccaaataaaatggaacttttgtggctacattatagaattgttttagactgcttaattctgtgtgttgttgagaaagggaggagtggggaaggtaaaaatcttgacatactttcttcgtgggtattttttcttgagcgattccatcttagttgattagcagttagcaattgcccattcaacagaaggttttcttacctttttgtgataatgatagctaacgacatcatttcttcttttttccctctcttcttgttgtctctaggtgatggccattgccactttggctgcctgttataataaccagcaggtgttcaaaggggcagtgaagattcggaaagggcaagcagtgaccctgatgatggatgccaccaatatgccagctgtcaaagccatcatatatcagtatatggaagaggtgggtttttatttaactacttggataatttgtagctacttttatgatttagtaatgtcactgtttaaccaggtttggatattagatgatcctaacaattcactatcctgtggcctaaagagacaggaattgatatcctttataaggaaaaaagtctattcacaggagccgagcagattgctcactgctgtgtagtaccctggtgagaggagataaatggagcaaggctgtaggttggagcccctcagtagaatcatagattttgagctgcaagatgatgcaggaggccaaccaagcttcttgttgctggtgaggaatgtgaggttgaagcttgtctgtgctgatgcagtgcgtgattgagtggatctctggctcccgtccatgtgtcctgacacccagtctggtactttcattatgccacaggcctcaattgaaaaatcacagtagggaatttaggccaaggaaagccatcaagttgcaattatttcctaaattttctttggaaaatttcatttcaaataccaaaaccatcctataaaaagaaaacttaccttcttaggtcaaatctctaatatttgactaggttcaaaaagtttatttctggccaggcacagtagcttactcctgaaatcccagcactttgggagaccaaggtgggaggatcacttgaggccaggaattcaagaccagcccgggcgacatagcaagaccccatttctacaaaaaatttaaaaattgtcatggtggtgcacgcctgtggtcccagctactcaggaggctgaggcaggtggatcacatgagcctgagaggtcgaggctacagtaagctgtgtgatttcatcattgcactctagcctgggtgatagagtgagactttgtctcaaaaaaaaaaaaaaaaaaaaaaaaaaaaaaaaaggtcttagagaccagaagtctctgtaatctctaataatctctaggccctagagcagtggtttgtaaatggaggtgatttgctcccctccccccagaggacattggacaatgtctggagacatttttgattgtcctaaccggcaggaatcgggtgctactggcatctggtgagtagaggcccaggatgatgctgtgatcctcaggtgtgatcctgttgagaatgaaacactgtagactttatgaaaacatacaagaccctcatcatttttcctttgcctgagctccctccccagaggttacctctgttcatggttttgtgcatccgtctagtccccctattacgcgtttacaggaatatggtttgcaacagtgttttcatctaaatagaattatacaaaatagcgatttctgatttctcttgcatattgcacattcttcttatacttcctccctacctttatctgacacagaaatgctgtatgtccagaacttctatcagaggcacctatggaagtctaagggaagaccacatcgcttttaaaaaccctaaaattttgtagtcactagatgaaaatattcagccagtgacccaaaaaattgctaccaatgagactctccattttgccatgtagccagaacttactttgatctatgtgcctggggtagtgaccaagtaggtgggtaggagtaatctcagggaaacttgaggccccagcctcatggctagggtcataatttgaacccaggtctgtctgacatcagaatccatgatgttaaccccaattctaaggggttcaactaccctttctaaatggaatcctgctatattaggcactatttattcattttatataaactagaaacattttatgtagtaagtagttgagagtgttttggttttgcagtttgatcactagttttagaaaccagtttttaaacactttgtggccaattccattactatattaaaattcagatttatttggtttttccttaactattgggattaaatcctggttgtaattcatagtttgagggcgagggtgggcagtctacagttggctgagccctgtttttgtgaataaatgttatcagaacacagccacacccatttgcttctatgtcttctgtggctgcttttgcaatgtgacggccgagttgaggagctgcaacaggcgatgacttgtaaagctgaaaatattttttggcccttgaataagaggttggctgacttctgacttagggcatcagttgttctgttatcccagtaaaactcaaggcattaggggagaaatgttaatattaatacttaagttgatttgatttagggaaatctttgaagatttctaagtcttaagcagtagaacctgttaatggttttagtttcagcagtaaggacattttacaagtaaagttttaaatgaaaacattttgtatgaagccacaagtcgtctggcctcttgctggtgtccagatattaacactgatcctatttctccttgctgaccaagtctgtcctttgtagtaagaaaggaagaaacgttgactctgtccgatctctggacttagtgttgtagcgagcatgcacctggaagggacttgccagaggacctcctcatgcttctccagtgcttagtgggggcttggagtgcagccccaggtcttcacgagcagttggccacactgcagggccctcaccccactctggagcagcctctgcttcaaaccagcctggatgcttgtcagctggggagaagatcaacctgctattttgggatagaaataaatgctcagccaaacggccagaaacccccattcccctctctgccaaagtgaattccttggcagggagaagcttgttcgtgtctctgcacacttcctgtgccctcctgtggttaagtcagagaatcatccggctctttgagccccaggtgcctagctgctcaaggatggtccccagccagcagctgccaggaatcacctgggagcccattaagacatccagcccccacccaaacctatcgaatcagaatctgcctttttttcccaaatgatgtttttgctttaatggaagtttagatgttcatagacaagagttttaaatgatgatcaagctgattccatattcgcagttgtaagtagaactgctgagacgtggaagtaccacatggactcacagaggagctgctgtatgtagcacagcattgcacaagagcttatttcagtctagtaaacatttataggagcctgtgtcatttaatcatcaagcctcgcactgtggctcacacctgtaatcccaaaactttgggaggctgaggcaggcagatcacttgaggtaaggagttcgagaccagcctggccaatatggcaaaaccctgtctctactaaaaatacaacatttagccaggtgtggtggtgcacacttgtcatcccagctattccggagcctgagacatgagcatcgcttgaactcgggaggtggaggttgtagtgagctgagatggcaccactgcactccagcctgggcaacagggtgaaggccctttctcaaactcctcaagtatttggcttcaactttatgccgggcatgtagatgaaaagtcggctatgacctgtccttgacaagcagatgtaactccttgattgaggctagtaggtttttaagacctgaataattgagtttgcagaaacctactgtgtgccttcaggtaaatggagagtggggtttggtctagcaacgaagcatctagaaggtccctttggccttaccggctctgttttaggtaagtccacgtctgagtaccagtgactgcagctcttccagttgtgctgtcatgcttatatgttagaaatgatcatcaaaggactcaaaagttttgccactaattgtattaccggggactgtcacaaccaagatttctcttaatttattcaccttacttatctcctggaagggcatattgaagtgctcttggagttctctaaaagggtttttgttggttgtgtatattcacttgggtgccagcgattgattccaaataagtaaatcttttttcccaaaaggatgtaagatggcttatggttataagtacaacaggctaacaaagtacaagtagatgagaaagtaaaatgaagaaataaagtcataggagccacagaattaacccaggaatgaataagtgtgtagtttggtgctgatgttatcatcctttatttgtacattgcttgtacagttgctctgagaaggtaagtcttaaattttcaaaagtgaaatgtcaccgagcatggtggctgatgcctctaatctcagcactttgggaggctgaggcaggcggatcacttgaggtcaggagttcgaaaccagcctgacttatgtgatgaaaccctgtctctactaaaaaaaaaaaaaaaaaaaaaaaaaaaaaaaaaaaatccaaaagttagttgggcatggtggcaggtgcctgtaatcccagctacttgggaggctgaggcaggagaatcacatgaacctgggaagtggaggctgcagtgagccaagattgcaccactgcactctagcctgggtgacagagcgagacaccatcttaaaaaaaaaaaaaaaaaatctacaatataccaaaaccattacttacctgagaaactattctcagggtcattgtagtgaatgcctattttatggcttttgatggcatcagggcactcaggtcatttacaagagtagtgtgtgagaccctgtgtgtcactgccactcatcttggccttcggccactgctgtagcaaccagtttccaagtagggctggaccttgccttctgctccagagacctctcgcttcctgcccttgggcttctgacgagctgcaggaactgcctggcacgtgggtccccacaacccagaggaggtgagggccacctctctgctcctcagggccacctttcataaggctccttgaaggtccctcaagatcaagccaactcaacacatccttgataggccttcctgccttctgtttcacttctccactcgtttccaaataaatggctgcatgcaagcttttgcctcaggttctgcttttaggaggaaggctaagacaagcagtaaagcaacatgggcaggcagaaggatgacttctaatagaattatctcatcactatatattttactttatggatgcttgtattgaaaagtcttggctgggtggagtggctcacgcctgtaatcccagccctttgggaggccgaggtgggtggatcacttgaggtctggagtttgagaccagcctgaccaacactggtaaaaccttgtctctattaaaaatgcaaaaattagccagggatgcacgcttgctgtgtgccagcacagggctaggctggagataaaaaggtgagtaagtaggtgcggtgtagtcagggtgaaaactacagatggtccatttccacgtaagtggaaaggtaaaggtatgtacaatagggtggctcctggctgaacctggagctgcagacaggttttctagaaggcataatcctgaagttgagacttgggggcctaggtaggagccagttgaagggacgtgggaggtgcattccagagagaaggagtggtatgagactggaacagaggtgtgcagcagcatcgcatgggcgaaacaacagtagacagttgttcttttgtttttgtttgttttttgagacagcgtcttgttctgtcatccaggctggagtgcagtggcatgatctcggatcactgcaacctccacctcccaggctcaagtgatcttcccaccccagtccccaagtagctgggggaccacaggtgcatgccacgatgcccggctaatttttgtacattttgtagaaacagggttttactgtgttgtccaggctggtcttaaacgcctgagcttaagcagtctacatgcctcagcctcctgaagtgctgggattccaaacatgagccactgtgcctggcccggcaactgttactagactatagagagggaggtgggcaagggctggtgacactagacaggtgcagtaggtctggaccatgggtggccttgcgctacacattacagagctcaggctttttttctccaggtgagagggctggtgccactgaggcatcaagcagaggtttgagatctccttggtgacagtgtagagcagacaggtagatttgggaatttaagcttagactcacgttggagactgagatagctcatctgagaggcactcagggcctaatctcaggcagtaattttagggatgtaggggaagagatggattctgcacatacttgggaggcttgtggaggagtggggagggaggcacagggaggactccagggtggttcatacggctccctgcttctgttcctgtccccctttgtcaagctgtggtctgtactgcgtgttccatcttgtttctaagctgcttttgcccagtctttccagcatttccctttcgtcatgttagtctgtgcctgtctacgtgaactatggtgacgtttattgggcctggcactgtgaggtgctggggatgtgaagatcattgtggctcagccgctgctctcgagggcctctgggtgcagtatgcacacctgtgcctcctgtttgctcaggaagacaggctttgagatgagctggggctgacatccccaccttatcattgggatggctttgggtaagttatgttcatgttctctgagcctccctttcctcattggtaaaatgggtataaaatacctgccagtggagggttgttgtaagtagccatggaaaatgtaaagcacatagcacttatcattttttcctgtgtctttaacagatttatcatagaatccccgactcagacccatcttctagcaaaacaaggcagatcatctccaccatccggacgcagaatcttcccaactgtcagctgatttcccgaagccactactcccccatctacctgtcgtttgtcatgcttttggctgccctgagctggcagtacctgaccactctctcccaggtaacagaagactatgttcagactggagaacactgatcccaaatttgtccatagctgaagtccaccataaagtggatttactttttttctttaaggatggatgttgtgttctctttatttttttcctactactttaatccctaaaagaacgctgtgtggctgggacctttaggaaagtgaaatgcaggtgagaagaacctaaacatgaaaggaaagggtgcctcatcccagcaacctgtccttgtgggtgatgatcactgtgctgcttgtggctcatggcagagcattcagtgccacggtttaggtgaagtcgctgcatatgtgactgtcatgagatcctacttagtatgatcctggctagaatgataattaaaagtatttaatttgaagcaccatttgaatgttcgtaatagtagaaaatgatgtgaattttctttctgttcggctcctatttttctcatcattttgttttctttaattgggttgaatggagtagatagaaatatttatggtttaggtaacagttagatgtttcctaagaatgcaaactgccttttccacacaaaggctgggaataaaattctgggtattctcgtattctcatttaaaggagtttagctttcagagagaaacagcaggattgcttttgaccttttagaagattggtctccagtaaaggtggacatttttgagatttttataataaagaatttaattgctctgcatttgtcaagta

SEQ ID NO: 2171 - DNA, 2272 bp, Homo sapiens
gctaagccggagaatattgacttggccgtgcagtgcctgaatgaacttataaccaatgcactgcaccacatcccagatgtcatcacctacctttcgagactcagaaaccagagtgtgtttaacttctgtgctattccacaggtagggaagggggctcctctgggtggatacggggctaaagggagtggggtaggagtaagggtggattttgctgtgctatattcaaggatatgattccttaaaaagacgatgactccagtttattcccctgggagtttcatagcacccgcctttgcttccagccaccaaactcagctcagccttgaggttaagcctgctccttttcagaaccttctttctggatttactattttctacagctatcctaaactagttaggttcttttcctcacagttaagtcaaggtctttggcttagatttatggggagtgctgggtaaaacctgggtgaagctgttatcattaaaaagtcttcattaagcacctaattactgctgtccttttcctagacccggcataaaaagaacctggtccggtagacctagcctctcagtatgctaggaacttacactttttagttgcctttaccaagtattgcagatactactgcaaataagtgaagaaagtaacagcatttaactgatttgggaacttggtttgatcttgttctaatgaccaacttcgaatggtggttgaaagtaaaatctgtatcgccgtcttatgtttccatttacctagaaatactttacctttgagcacaggaaattaatccccttctggttgttctccccctggcattggttttaaatatataatgattatgtttgttgtaggaaaaatagaaaaacaactacaatagaaaattcttcccatatattattttgaaatacatatttccgatccgataatccattgctctagcatggaaaatgttggatttacttgtgtttgctttttccaaataaaatggaacttttgtggctacattatagaattgttttagactgcttaattctgtgtgttgttgaaaaagggaggagtggggaaggtaaaaatcttgacatactttcttcgtgggtattttttcttgagcgattccatcttagttgattagcagttagcaattgcccattcaacagaaggttttcttacctttttgtgataatgatagctaacgacatcatttcttcttttttccctctcttcttgttgtctctaggtgatggccattgccactttggctgcctgttataataaccagcaggtgttcaaaggggcagtgaagattcggaaagggcaagcagtgaccctgatgatggatgccaccaatatgccagctgtcaaagccatcatatatcagtatatggaagaggtgggtttttatttaactacttggataatttgtagctacttttatgatttagtaatgtcactgtttaaccaggtttggatattagatgatcctaacaattcactatcctgtggcctaaagagacaggaattgatatcctttataaggaaaaaagtctattcacaggagccgagcagattgctcactgctgtgtagtaccctggtgagaggagataaatggagcaaggctgtaggttggagcccctcagtagaatcatagattttgagctgcaagatgatgcaggaggccaaccaagcttcttgttgctggtgaggaatgtgaggttgaagcttgtctgtgctgatgcagtgcgtgattgagtggatctctggctcccgtccatgtgtcctgacacccagtctggtactttcattatgccacaggcctcaattgaaaaatcacagtagggaatttaggccaaggaaagccatcaagttgcaattatttcctaaattttctttggaaaatttcatttcaaataccaaaaccatcctataaaaagaaaacttaccttcttaggtcaaatctctaatatttgactaggttcaaaaagtttatttctggccaggcacagtagcttactcctgaaatcccagcactttgggagaccaaggtgggaggatcacttgaggccaggaattcaagaccagcccgggcgacatagcaagaccccatttctacaaaaaatttaaaaattgtcatggtggtgcacgcctgtggtcccagctactcaggaggctgaggcaggtggatcacatgagcctgagaggtcgaggctacagtaagctgtgtgatttcatcattgcactctagcctgggtgatagagtgagactttgtctc

SEQ ID NO: 2172 - DNA, 422 bp, Homo sapiens
ttctgttatcccagtaaaactcaaggcattaggggagaaatgttaatattaatacttaagttgatttgatttagggaaatctttgaagatttctaagtcttaagcagtagaacctgttaatggttttagtttcagcagtaaggacattttacaagtaaagttttaaatgaaaacattttgtatgaagccacaagtcgtctggcctcttgctggtgtccagatattaacactgatcctatttctccttgctgaccaagtctgtcctttgtagtaagaaaggaagaaacgttgactctgtccgatctctggacttagtgttgtagcgagcatgcacctggaagggacttgccagaggacctcctcatgcttctccagtgcttagtgggggcttggagtgcagccccaggtcttcacgagcagtt

SEQ ID NO: 2173 - DNA, 240 bp, Homo sapiens
atcacgacattaggggatcgagaccatcctggctaacacggtgaaaccccgtctctactaaaaaaaaaaaaattagccaggcgtggtggcgggtgcctgtagttccagctactcgggaggctgaggcaggagaatggcttaaacccgggaggcggagcttgcagtgagctcagatcgcgccactgcactccagtctgggcaacagagcgagactccatctcaaaaaaaggaaaaaattgt

SEQ ID NO: 2174 - DNA, 429 bp, Homo sapiens
cctgaagtatatgttgcagacggccactggcacacttttctaattgggaaaaatggaacagcaacagtattgtctgttgacagaatatataacagagatattatccaccctactcaggacttcggtggccttgatgtgcttactatatcacttggaggaattccacccaatcaagcacatcgagatgcccaaacaggtaaatgcctttattaagtagagtcacaagggaagtaaaattgttcttcaaaaagtaattgctttttcttgtggcaagactacacatttaacatgaatctcatatacagaacaatttcattcaataaaatttatgtttaaaaaagtagtttgatgtctgataatatcaattataaatatcctaagaatgtcataactatcttcagaaagtttgtaataaactattagccacca

SEQ ID NO: 2175 - DNA, 592 bp, Homo sapiens
ttcttaccaaggttgtaattcagtccatagtgttttgatgctttgcttgtccaccaagcatttcatatacatttgttcatttatttattcattcacagccactctcttcatagaccattaatggagacaaacattaatcaaattcttacacaagtaactgcattattctaatgtgtgataaataatacaaatgaagaatgtagaattctaaaatatagtgaaaaaagagaaaggaaggggaattttgctgtggaattgacatgtatacataaatctgaatgatgaggaggatgaaagtgtacgaaaggttaatttatgttgataggaatttttttaaagaaatcgtttaagccaaagttatagaagacaacacattggaggctaacatcataggcaaatgatgaagttggagaatgaagcaacttcctgaccatgttgcagttttggtcttatttacagagcaatgggaagtaattgaaaactttaatcacagtaggatcaagttagatatgcagtaatattacagatcattcaggctacagcatggagaatgaattggaggaggacacgagtggatctacagaaatgagtt

SEQ ID NO: 2176 - DNA, 451 bp, Homo sapiens
tgagagagagatttttcaactggctgcaaacaagatagggtagatcttggaaaccataatatagaggaattgaaggcacttggccatgagaagaaagaagtcattgcaggcaagagcactgtgttccaatgcttagggatacagaatgaagaacagaattattttgtgtggtccagaagacaaatctaggacaaatagttggcttttcatatagggatggtttcatcttagcataaagaaaaacactgtcttcaatttctcatcatttgagctagttagcaatagaatgaggcacctgcatcattgggcttatgaattaattctgcaaatatgtattgaatgcctactatatgccaagccctgttctggacatgagcaggtgatcaatgagatagtcatggatttgccgtaatagaatttacattctagtggggcagataaccaacaagca

SEQ ID NO: 2177 - DNA, 451 bp, Homo sapiens; identical to SEQ ID NO: 2176

SEQ ID NO: 2178 - DNA, 266 bp, Homo sapiens
ctgttgtgttatattcatgagcaattgctaggtgatgaagctttgtatttgaatagcatttgacaatctacaaatgccaagtattattatgtgttaatgagtctcgactttgcatttccaagtctgcgcctctgtcctgaactctaaacttacatatccaactgcctactcaacacttcacgtagaaatcttatggtttgaacttatcctgttcaaaactgagctctcaatattttttcttcttccttcatttccccaagctgctc

SEQ ID NO: 2179 - DNA, 113 bp, Homo sapiens
acacctgtaatcccagcactttgggaggccaagatgggcagatcatgaggtcaggagatcaagaccattctggccaacatggtgaaaccccatctccactaaaaatacaaaaa

SEQ ID NO: 2180 - DNA, 266 bp, Homo sapiens; identical to SEQ ID NO: 2178

SEQ ID NO: 2181 - DNA, 113 bp, Homo sapiens; identical to SEQ ID NO: 2179

SEQ ID NO: 2182 - DNA, 324 bp, Homo sapiens
agctgagctggaaacagcaatttgttccttaaagttctgaacccaactgttatccagcatggagtctgtctggagaggccagatgtggggcctctcacaggggaatgagaagtgcctctcagggtcccacccatgatccccctttccttgcccacacaaccaccaactggcaagtagtaacccaggacctgtagcccccactggcttgacacagagcataatgcaagcttttcctgctccaggtcctggacaccactttgccctttgccccacacgtacagccccctgaccaaaagctgggtactctggcttgactagagggag

SEQ ID NO: 2183 - DNA, 324 bp, Homo sapiens; identical to SEQ ID NO: 2182

SEQ ID NO: 2184 - DNA, 652 bp, Homo sapiens
ctgacctcaagtgatctgcctgcctcagcctcccaaagtgcaaggattacaggcatgagccaccatgcccggcataggcatggttttgacaatctgtctctttgtgccctggctccttctccaactcctctttggaggaggcacaggaggaggggtcatttcactgttcctgaaaagtagacatataacctacatgcaactgccaggtgataagggccccatctgtctggcatgacgttggaggtccacaaaggctgattagatgaatgctcagctctggggcctccccacagagctcacagacaggcgtgaaggaaagcaggactcttattagaatatgttcagagttttcactgaagaagcctcctgtgtgggccaggcactgtgctcagtgctttgattcacagtctcatttaattctcaccatttacagacaagaattcagctaagatccttttcaatcaagtctggcaatatctgcctttcaatggcagtgcctagtcctttcatatgtaatatacttatcattatgggtgggtttaagttttatcatcttgctatttgttatctatttgtcccccctcttttgttcctcctttactgccttctatttggttgagacttaataaaatattttattccatcttctcta

SEQ ID NO: 2185 - DNA, 686 bp, Homo sapiens
ctcctgacctcatgatccgcccacttcgtcctcccaaaatgctgggattacaggcatgagccactgcacccagcggattaagtcttaacgtatgagtttttgggagaaactcaaacattcggacaatagcaaggagaatacaaaaccacagtgagctaccgcttcagacaccagagaagtttaagtgaaaaagactggcaataccaagtgctgatgaggatatggagcaaccagaactctcagacattgctgatgggaatctaaattagtataaccaccacgaaagcatccgtaaggtttaattgtgttgaacacaccctgccctctgaccaagcatttccactcctgggcatacaggcaaaagaaatgcatccacgtgttcatcaaaagatgtaacctgtgccaggtgaggtggttcatgcctgtaatcccagcacatcgggaggccaaggagggaggattgcttgagcccagaagttcgagagcagcctaggcaacaaggcaaaacctcgtctctactaaaaagtagccaggcatgatggtatatgcctgtagtcccagctactcaggaggccaaggcatgcagattgattgaacccggaaggtggaggctacagtgaattgtgatctcgccactgcactccagcctgggtgacagagcaagatcttgtctcaattaaaaaaaa

SEQ ID NO: 2186 - DNA, 686 bp, Homo sapiens
ctcctgacctcatgatccgcccacttcgtcctcccaaaatgctgggattacaggcatgagccactgcacccagccgattaagtcttaacgtatgagtttttgggagaaactcaaacattcggacaatagcaaggagaatacaaaaccacagtgagctaccgcttcagacaccagagaagtttaagtgaaaaagactggcaataccaagtgctgatgaggatatggagcaaccagaactctcagacattgctgatgggaatctaaattagtataaccaccacgaaagcatccgtaaggtttaattgtgttgaacacaccctgccctctgaccaagcatttccactcctgggcatacaggcaaaagaaatgcatccacgtgttcatcaaaagatgtaacctgtgccaggtgaggtggttcatgcctgtaatcccagcacatcgggaggccaaggagggaggattgcttgagcccagaagttcgagagcagcctaggcaacaaggcaaaacctcgtctctactaaaaagtagccaggcatgatggtatatgcctgtagtcccagctactcaggaggccaaggcatgcagattgattgaacccggaaggtggaggctacagtgaattgtgatctcgccactgcactccagcctgggtgacagagcaagatcttgtctcaattaaaaaaaa

SEQ ID NO: 2187 - DNA, 652 bp, Homo sapiens; identical to SEQ ID NO: 2184

SEQ ID NO: 2188 - DNA, 549 bp, Homo sapiens
ccagtgctgagttcccttcaattacacggaaacgaggtcttcggggtttccatctgagggtgtatgagtttcctgtgtctgccataacaaataaccacaaacctgatggctggaaaataacagaaactcactctcccaaatttctggaggcagctggaggggacaatcgcttccccacctcttccagcttctagtgactggggttcctcgcctgtgtcttcatcactcatcactcaggtctctgcctctgtcttctctcctgtatgtctgtttttaaaaaaccctctgtatctctcttataaggaggcaatatatcccaggaccttgggaggccaaggcaggtggatcccttgcgctcaggagttcgagaccagcctggccaacatgttgaaacgtcatctctactaaaaacacaaaaaaattagctgggtgtggtggcacatgcctataatcccagctacttgggtggctgaggcatgagaattgcttgaacctgggaggtggaggttgcagtgagctgagatcatgccactgcactccagcctgaga

SEQ ID NO: 2189 - DNA, 549 bp, Homo sapiens; identical to SEQ ID NO: 2188

SEQ ID NO: 2190 - DNA, 3145 bp, Homo sapiens
atttcttttctgtgtgtaaatagttgttttgttctttgagacagggtcttgctttgtcacccaggcttgactatagtgccataatcatgactcactgtagccttgacctcacaggctcaaactaccctcctacttcagcttcccgagtagctgggattatgagtatgcaccaccacacgcagctaatttttttctttttttggatagagacagggtgttgcccaggctggtctctacctcctggcctcaagcaatcctcctgcattggcttcttaaattactggcatgagccaccatgccttactttggctagtcctatattctctagaattctctttactttgtgctagccaatctctcatgctgttcccctgttataatgaataattatctatattaaattttagcactttgggcttttgagtggtttatgtctcctgattggaccctgactaatacagagttgatgctgggaagggtcccaggagacagacccacacagatgggatttggggatcagtttggttatcttaggggccgtgctgagctccttgcaatgggaaatgggatgctgttgatttccaggaagtgacctcacaatgactcaagctaccacttagtgttgattgtgatgaaatgccagctgtggcatatgccttgggagctaagtggctgctgcacttgaccactatgaagactggtgtggaagggtccttctggatgtacttgggcagggtccccaacgccagagccatggaactgtaaggagccacacagccggaggtgaatggtgttgaatgagggaagcttcatctgtgtttacagccactccccattgctcacattcctgcctgagctctgccttctctcagatcagcagcagcattagattctcataggagcatgcaccccattgtgaaccatgcatgtgagggatctacgttgcgctgtccctatgagaatctaatgcctgatgctctgtcactttctccaatattatcttcaagtgagccactcctggcccaattcctgtctcccgttggcctatagaggccaagcctctgcctcatgatggcctctgcaggtcaagctcctcctcctggttccgtctacaggcccaacacttccctcaaataaactcttctgcccagctcctgtccagctcacggcagccactgtcggcatgaaaattcctcaattcaagctctctaggcccaccttctgcctcccactggcctggacacgcccagctccaacctgacaatggtctctacaggcccagctcatcgggctctgagggacctctccaggccaagctcttacctcacggaggcttctccaggtcgtttctccctgtcttcaggcagtggtgacaggtcagctcctcctccacagtggcctcgtttgggcaggtcctgcctcttgcagcctctcaaagcccagctcctgcctctgagtggcttctgcgcacccaaatgtcctccagtcagcctgtcctggctgagctcctgcgacctggctgagctcctgcctcctgtcggcctctataaacccagcctctgctgtatggtggcttcttcaggcccagctcttcctcctggcggtgtatacaggtccaactcctgcttcccaatggactctttaggccaggctcatgccttacggcagcctttcctggcccagcttttgcctgttggcataccctccaggcccacaatgtactcagatcagccactccattcccagctcttcttcctggctgtgtctacaggcccaactgctgcctcacaacaccctcttttggcccagctcctgcccagcacctggtggcctctatatgccccagacttcttaaagtcaactttgctaggcccacctttggcctcccagcggctttgacaggaccagctcttgcctcatggcagcttcccaacgccaggtttctgcctgcattgtggcatccttgatggacccaactcttgctttatgccggccttcccacaccaagtttctgcctgcctcatggcaggatccgataggcccagctcctgcctctaatggcctggttaggctcatctcatccctcaaggtggccaccccagatgaagctcctgccttttggcagcctttagaggcccagctcatgcatctcattgcctcttgaagcccagctcattcctcaaaacggcctatccacgcccagcttttccctttggtggcttctccaggcccagaaattcctcagttcggcttcgcaaggtgaagttgctgcctccctgtgccttctccaggcccagttcttcctcccagctgggtctacagtcccatctcctgactcaaaacaacctattttggctcggctcctgcccagcacctggcggcctttgtaggcctaaagcttcctcaagtcaagcgttccaggcccagatcatgctgcccaggggccttcacaggcccagctactgcctgacgatggcttccccaggcccaggtcttgccttcccccagcctcccgaggcccagcccttgcctcacagttgctttcccagtccacgttacagcctgttacccgacggccttgacagaccaaactcttccttcacactggacagtttaggacaagctcatacgtcttccagcctctccaggtcaagctcctgcctcacactggcctctataggcccaggtgctgaatcgcaatggtctgtttaggtccatctcatgcctttctcagactctccaagcgacgatctggcctgacacttgcttctgtgggccatgtgatcactcacactggcctctttaggatcaggggatgcctctccacaggccgagatcctgcctgttgtaggccccttcaggatgcgccgctgcctgacagtggaccctccaggcctagatgttacgtgatcatggcctctgcaggtcaagaatttaaattttcgcagcctctataggccaggctactgcctcctgataatggcttctgcaggcccaaatcgtcctgaaataagcctcgccaggaacagcacgtgtgttggatgcccgaacaaccatagcttctcccgcacagtggcccatgggggccgggctcttgcctcagcctggccacctcaggcccagttcttgcctgttggcggccgct

SEQ ID NO: 2191 - DNA, 118 bp, Homo sapiens
ccagctactcagaggctgaggcaggagaatcacttgaacccaggaggtggaggttgtggtgagccgacatcgcaccattgcactccagcctgggcaacaagagtgaaactccatctca

SEQ ID NO: 2192 - DNA, 458 bp, Homo sapiens
ggccccaagctgccttcctcgatgtggcccaaagtggcccaaagcgtcccaaagtaggcctcgccaggcccacctcctgcccggcgtaggccctgaggggcgcggcccctgccccatactggcctcttttgggccctctcttacaccagcccctgtctcaggattgtctcttcacgcccatcttctgcctcatagtggtcactcaaggcctcgcttttgcctgatgattgcgttttctggttttgctcttgccttgtattcccttcttcgggatacagcttttacgtcttccatggtgaacctcatcaaggagactaaatcttccctggtctgtcatttttttcacttcacaccagagtgccttgggaaaaccccatctcttcttttaaccttgagagtggatttctgacgaattgataataaattttttctctgtggtttcagtgatttctgtttta

SEQ ID NO: 2193 - DNA, 436 bp, Homo sapiens
cattttccccttccagggatttgtcctattaatagttgatatagaaaaattcaattttaagaaaaaatataattattttatccataatataaagaagaaaaataaaaatttctcagtggagggagaaaaacgcaccaggaaaatgtcactacaaagtggagaaaaattggcagtactttcaacattcattttgtaacttagttaagcagtgagttcacaaagcggaggtaaagacattcagagcagagatggctagacagtaagagcatgtgaaataagaattgacagactaagaaaagaaatttaaagaaaagataaaaaatcatttcagaaatgaaaccaaagcgcaaggagccaaagaaagagctgatcccacagagagcaccggggcagagtgtccttgtgtctaggaagggtgtcataaatgtttgcttaa

SEQ ID NO: 2194 - DNA, 436 bp, Homo sapiens; identical to SEQ ID NO: 2193

SEQ ID NO: 2195 - DNA, 167 bp, Homo sapiens
gataacaaccaataatacacttcacatcaaaaaatgtaattgaaaaattaacttgccttaactaatctttgcattcttattattttacccagtattcagaacattctaataattattcggggaatataaaggatataaaagataaccttgttctcagggattagact

SEQ ID NO: 2196 - DNA, 167 bp, Homo sapiens; identical to SEQ ID NO: 2195

SEQ ID NO: 2197 - DNA, 387 bp, Homo sapiens
ggactatgcctatgcagtttattgttgacctaaactttaaatatgaattgtgggggctcagtgtgggcaagccagagagactaaaaactcaatggggacccagtcatagggggctctcacacttttgtgaactttacctctaggagctccaccaggtcttcatggtgagtatcagagacaactcccctcatgcttctcataggttcgggggaaggaaccatactgaattccatcagagccttcagttcttgacaagccctgccctctggagaaattgcttcaccggagcctctcctgcaaagggtttatcgcagccccgcctacccggagcaagggagatgcctagctccagctggttctagctttcagcattggggaagggagatg

SEQ ID NO: 2198 - DNA, 98 bp, Homo sapiens
atcacttgaacccgggaggcagaggttgcagtgagccgagatcgtgctgctgcactccagcctgggcaacagagcaagactctgtctcaaaaaaaaaa

SEQ ID NO: 2199 - DNA, 272 bp, Homo sapiens
ccaaagtgactcaagcagtagaaaatctaaagagcccagaaatcatagaagaacttgcaaaggttgtaaggtctaaaaatctgaagtgttactaggtccatatggtgttcttggtgcagtctgtataattttaaggaaagaacaaaaattaaactgttgtcagtagtttggttagtgaactatttcagagcagatgaaatagtggtaagtactccaatccattttacaaatcctctgtaataccactaccaaaactgttacagatagcaaaa

SEQ ID NO: 2200 - DNA, 197 bp, Homo sapiens
caacctccacctcctgggttcaagcgattttcctgcctcagcctcccgagtagctgggattacagacatgcgctaccacacccggctgatttttgtatttttagtagagatggggtttcaccatgttggtcaggctggtcttgaactcctgacctcaggtgatcctcccaccttggcctcccaaagtgttgggatta

SEQ ID NO: 2201 - DNA, 368 bp, Homo sapiens
agtatgtaagaagcctttgattacaagcagtagaaaccaatgtgagctagcttatgttgaaaggggggattattttaaggatacaggatttcctggaattcaagagtaggaatatataggcagacctcataaaggcttgtggtggtgacattgccctcttggtttcagtcagggttcttaggagagctgatgatttttctcctattgatttggttttctggtttgttttttgctataccatgctgtcatttcttttaaaaaaattaaactattgtcagtagtttggaggatatccttctgcagatctgtgcttatacgcacatatgcttataagatctttcctcttagcatgaaaacaaggatcattt

SEQ ID NO: 2202 - DNA, 1022 bp, Homo sapiens
ttcactttttatatatttagagtttttatatgagtgtgaatgtttctgttttgatttggtgaggcatgtcagaggtatatacttgaatatttttctaaatacagctgctggaggaatgcaaatggcaaaaatcatccagaaaaccaaacacggtgaaacatcacatccatttggcatgaagcaaagcattacaaatttggagtgatgaaagtgttccatatattttttatagtgatttttcgatctagagacccttcatattgtttacttactattacaataactttgagaggtaaccagagaaagcatttttgccatttccagatgaggaagcaggaccagaaagctcttcataaagctttaacaccatacaagtatccagcagtgatcaattgctctttataggaaaccacctttcctctggggaagaacagtctgaattaataaaacatcagagtggttgagtagtaaaaataaacacagatgtattgctttcaagtcttagagtgacataaagtagtcttaaataaatagttcttagtttattttaagcagttgattgtactaacgagatgtaattatctgaagtatttatgattagcatattggtttttataagtatttctgagttattgagggtgcttaaaaatgctgaagaaactttaaaacatgattcttcttataattttatgtgattcttatagcacaatcatttttgaaaaaggaaaactaggctgggtgtagtggctcatgcctataatcccagcactttgggaggccaaagtgggtggatcacccgagttcaggagttcgagaccagtctggccaacatggtgaaacctcgtctctactaaaaataccaaaattatccggtgtggtgacaggctgcttgtaatcccagctactcgggaggctgaggcacgggaatctcttgaacctgggaggcagagattgcaataagccaagatcatgccactgcatgccagcctgggtgacagcacaagactgtctcaaaaaaaaac

SEQ ID NO: 2203 - DNA, 3499 bp, Homo sapiens
ttcactttttatatatttagagtttttatatgagtgtgaatgtttctgttttgatttggtgaggcatgtcagaggtatatacttgaatatttttctaaatacagctgctggaggaatgcaaatggcaaaaatcatccagaaaaccaaacacggtgaaacatcacatccatttggcatgaagcaaagcattacaaatttggagtgatgaaagtgttccatatattttttatagtgatttttcgatctagagacccttcatattgtttacttactattacaataactttgagaggtaaccagagaaagcatttttgccatttccagatgaggaagcaggaccagaaagctcttcataaagctttaacaccatacaagtatccagcagtgatcaattgctctttataggaaaccacctttcctctggggaagaacagtctgaattaataaaacatcagagtggttgagtagtaaaaataaacacagatgtattgctttcaagtcttagagtgacataaagtagtcttaaataaatagttcttagtttattttaagcagttgattgtactaacgagatgtaattatctgaagtatttatgattagcatattggtttttataagtatttctgagttattgagggtgcttaaaaatgctgaagaaactttaaaacatgattcttcttataattttatgtgattcttatagcacaatcatttttgaaaaaggaaaactaggctgggtgtagtggctcatgcctataatcccagcactttgggaggccaaagtgggtggatcacccgagttcaggagttcgagaccagtctggccaacatggtgaaacctcgtctctactaaaaataccaaaattatccggtgtggtgacaggctgcttgtaatcccagctactcgggaggctgaggcacgggaatctcttgaacctgggaggcagagattgcaataagccaagatcatgccactgcatgccagcctgggtgacagcacaagactgtctcaaaaaaaaacaaaaaaaggaaaaagaaaactagccccagtccctgtctaaattgttatagtttttgactattatctgaattagtcttatccaaatttcatatgcagattgatttttcattttgtatgtatattacatgatataactattttcatagaatatatttctaatttacaaacactgaattattagcttgatagagtttctcccaaaccttataaaactttgaaatgtacttatgtttgagctttaaaaattataaaaacttcatttaaacaagttgctggcatcattactagcctttccacctataattatgatgcatttgatgccactgaacagtaatagcacaaagaacaggtcacacagtctagactggattgagttttaattaaacttcttcatccatagcctgataagaatcaggctgggtctagaagagttatcagactgtaggcctgtattaattttgcaagctaatgttaatgtttactgccagccttgcatagcaatgccagtttgcagttgtgactatgatgtgacttttggtaaaaatggtttatatctaaagtagtttagattttatggaagtggctcttgattgtttggacaagcagggtaggtaaatttcaattacgtttgaagtgtaattaaatcctagaatagagcactctccagaaaaaaaaatgaaaaaagaatttggagaatatcctggcatgaaaacttttttgaataatacgtagaattttgacaaggttcatacagtgcatacagtgtgaccttttctgaggtgggcagggagggttgctacgttgtgttgatttaaaatttcaaggaggaacaaaaacattctagccaaggagaattgcattgttatttttttttctactaatttaaacgtgcatttttcacagttacacatttaagttttgctaccaaaaatggccatttttctagacagataacattttcctaaagtggaagagagatccactgttctaaaaaaaaaaaaaaaaaaaaaacactaaattgtgccttctcccttaaattataagaagagtaatagtaaaaacttgtttaaactatattttctttttttctaatccctctcagttctccttagatctgcctcctacaaatgatcatgttgtttgcatctgcctgattgagttcccttggtcaaacctctccctatcactatcagaagttgttcactaaatgtattttcctatttctttcatgttgattgactttataagtcaccttggtaaacataacatttggctaccttctcatgctttataaatgaatttgatgaatggcagtttttatattttaaccctttaaaaagtttgtcaaggaaacaactcagagctaagaacaaaatctaacttggaatcagtttcttcctttggctgctgaagcagcagcaagtcacgtaacctcatttagttttttgatttacaaaatgtggataataacctacctcacagatgtgtgtgagcaactgtttgaaagcccttgtttaaatacagggtttatatccccacattcaatgtaaattcctttttttaaaaaaaataagtatctttgatactgataggatgagtatcttgatttttaggtaagatcacagtttcacaaattgtggtgttgttaggtgacatttaatatttcttgagacctcaagtattcaaatatcaaacttgtcctgtgttgtaacaaatattcagaatctcttaaaatgttggctgaagctgccttaatgtaccaaaatacagctctcaagactgttcacaaatatctgtggttgtacaatgttttgaacatttaatgtaaagttgttgtagaactgtgaactctaaggatagtatctttattgttttaggaagaatggttgtgttctttgtcatgtatgcttaaatatacagtggattttgaatgcaacaaataaaactgaaaacagccatttggttgtgtcatgacaatcataatataggatataatatttactttttttcaaaaacatcctgcattcattcattcttagcatacctttgaaaaagaaaaaaaaatccataggttgatacattgacccattgaagtacttcattacgtatttattgaaaattttttttaattgttgaaattgggaccactttttataattggtttcaagaaaaaaaaatgaacagacttccagtgcttttctgttcaaataaactccgattcaaatttcagttttgtttgttatatactttttgtgagtgttaaatgatatgggaaggatttgtctttcattaaccatatggaaaagatgtcttcctgaattacatagcatttcatggttacagattcttcctaattaatgtttgcaccatatgaaactcataggtaacaaacacaaaggagaaaagcagcctgtctgattgcttataagcttttttcacaaaatcaaattaaaagtctctgattcatttgaaagcta

SEQ ID NO: 2204 - DNA, 3498 bp, Homo sapiens
ttcactttttatatatttagagtttttatatgagtgtgaatgtttctgttttgatttggtgaggcatgtcagaggtatatacttgaatatttttctaaatacagctgctggaggaatgcaaatggcaaaaatcatccagaaaaccaaacacggtgaaacatcacatccatttggcatgaagcaaagcattacaaatttggagtgatgaaagtgttccatatattttttatagtgatttttcgatctagagacccttcatattgtttacttactattacgataactttgagaggtaaccagagaaagcatttttgccatttccagatgaggaagcaggaccagaaagctcttcataaagctttaacaccatacaagtatccagcagtgatcaattgctctttataggaaaccacctttcctctggggaagaacagtctgaattaataaaacatcagagtggttgagtagtaaaaataaacacagatgtattgctttcaagtcttagagtgacataaagtagtcttaaataaatagttcttagtttattttaagcagttgattgtactaacgagatgtaattatctgaagtatttatgattagcatattggtttttataagtatttctgagttattgagggtgcttaaaaatgctgaagaaactttaaaacatgattcttcttataattttatgtgattcttatagcacaatcatttttgaaaaaggaaaactaggctgggtgtagtggctcatgcctataatcccagcactttgggaggccaaagtgggtggatcacccgagttcaggagttcgagaccagtctggccaacatggtgaaacctcgtctctactaaaaataccaaaattatccggtgtggtgacaggctgcttgtaatcccagctactcgggaggctgaggcacgggaatctcttgaacctgggaggcagagattgcaataagccaagatcatgccactgcatgccagcctgggtgacagcacaagactgtctcaaaaaaaaacaaaaaaaggaaaaagaaaactagccccagtccctgtctaaattgttatagtttttgactattatctgaattagtcttatccaaatttcatatgcagattgatttttcattttgtatgtatattacatgatataactattttcatagaatatatttctaatttacaaacactgaattattagcttgatagagtttctcccaaaccttataaaactttgaaatgtacttatgtttgagctttaaaaattataaaaacttcatttaaacaagttgctggcatcattactagcctttccacctataattatgatgcatttgatgccactgaacagtaatagcacaaagaacaggtcacacagtctagactggattgagttttaattaaacttcttcatccatagcctgataagaatcaggctgggtctagaagagttatcagactgtaggcctgtattaattttgcaagctaatgttaatgtttactgccagccttgcatagcaatgccagtttgcagttgtgactatgatgtgacttttggtaaaaatggtttatatctaaagtagtttagattttatggaagtggctcttgattgtttggacaagcagggtaggtaaatttcaattacgtttgaagtgtaattaaatcctagaatagagcactctccagaaaaaaaaatgaaaaaagaatttggagaatatcctggcatgaaaacttttttgaataatacgtagaattttgacaaggttcatacagtgcatacagtgtgaccttttctgaggtgggcagggagggttgctacgttgtgttgatttaaaatttcaaggaggaacaaaaacattctagccaaggagaattgcattgttatttttttttctactaatttaaacgtgcatttttcacagttacacatttaagttttgctaccaaaaatggccatttttctagacagataacattttcctaaagtggaagagagatccactgttctaaaaaaaaaaaaaaaaaaaaacactaaattgtgccttctcccttaaattataagaagagtaatagtaaaaacttgtttaaactatattttctttttttctaatccctctcagttctccttagatctgcctcctacaaatgatcatgttgtttgcatctgcctgattgagttcccttggtcaaacctctccctatcactatcagaagttgttcactaaatgtattttcctatttctttcatgttgattgactttataagtcaccttggtaaacataacatttggctaccttctcatgctttataaatgaatttgatgaatggcagtttttatattttaaccctttaaaaagtttgtcaaggaaacaactcagagctaagaacaaaatctaacttggaatcagtttcttcctttggctgctgaagcagcagcaagtcacgtaacctcatttagttttttgatttacaaaatgtggataataacctacctcacagatgtgtgtgagcaactgtttgaaagcccttgtttaaatacagggtttatatccccacattcaatgtaaattcctttttttaaaaaaaataagtatctttgatactgataggatgagtatcttgatttttaggtaagatcacagtttcacaaattgtggtgttgttaggtgacatttaatatttcttgagacctcaagtattcaaatatcaaacttgtcctgtgttgtaacaaatattcagaatctcttaaaatgttggctgaagctgccttaatgtaccaaaatacagctctcaagactgttcacaaatatctgtggttgtacaatgttttgaacatttaatgtaaagttgttgtagaactgtgaactctaaggatagtatctttattgttttaggaagaatggttgtgttctttgtcatgtatgcttaaatatacagtggattttgaatgcaacaaataaaactgaaaacagccatttggttgtgtcatgacaatcataatataggatataatatttactttttttcaaaaacatcctgcattcattcattcttagcatacctttgaaaaagaaaaaaaaatccataggttgatacattgacccattgaagtacttcattacgtatttattgaaaattttttttaattgttgaaattgggaccactttttataattggtttcaagaaaaaaaaatgaacagacttccagtgcttttctgttcaaataaactccgattcaaatttcagttttgtttgttatatactttttgtgagtgttaaatgatatgggaaggatttgtctttcattaaccatatggaaaagatgtcttcctgaattacatagcatttcatagttacagattcttcctaattaatgtttgcaccatatgaaactcataggtaacaaacacaaaggagaaaagcagcctgtctgattgcttataagcttttttcacaaaatcaaattaaaagtctctgattcatttgaaagcta

SEQ ID NO: 2205 - DNA, 529 bp, Homo sapiens
accttctcaaatagaatatgcagggagggaagtaggcaaaccatttacaagttgggtttttgttttgattaacctgttaagagacacttttgtaatctctagtgtttacattcctttatactagctatctataaagagaatccagaaggctaaattaatcagaaataattatatttctatgtcagggtattggctatatgtagcatgaacaattctccattttctgcaaatgggtttttcaggacagttttataattctgagtttgctttttcttattccctagacagtttgtactcagggaatacaaattgatttttactgttaaatgagacatagtttagaaaaaatcataagcaactattgtagatttttgatctgtttggatttatctgtagcattgaataatgtgcagtgtactgagttaatgtaggcacctcactttggatttataaaatgtaaaaacctggaacatgcctgccacagacaccactttgtctattcaccgggtactaatttacatcctattaa

SEQ ID NO: 2206 - DNA, 529 bp, Homo sapiens; identical to SEQ ID NO: 2205

SEQ ID NO: 2207 - DNA, 558 bp, Homo sapiens
cttcatttcttttcacaccagataggcatcatctttgaaaacatctttactgggtctcttgtctccctcctgcagccactgatctaaatcacagacttttttagaaagagggaaaatagtaaagaaagaaagcgattgagttgatgctcccagccactgtctgtaccctgaattttgtttttctgccatatgtcaggtggcctctcctggaccatcgtcactgtttctcctgcttccctgcagctgcagacacaggagcactgtgtaggtctggccttgagcacccacccacccagtacagagccagcccctgctgttctgaatcagtgcagtgaccacttagaacacagtgcccatgcctctgtgatctgaactgctctttccagttccatacaatgttaagaacccacttaagaatgttttaatcattcagtagtttttcgtggtatataataaaaaagtgatttaaatacaatctattttattttagattatatcattaggggttattttacaaagttacctttaaatactattgtaaataaaattaataacaaa

SEQ ID NO: 2208 - DNA, 708 bp, Homo sapiens
agaccattcatatcaagacccaagccatgagaaaatgctacaatgcccttgatcaatactttataggcattttgacctcagatctaatcccatgaggcttagaccaagaccttgcttgatgcagacctctctgactgctgaaattggtcaggagctcagtgatgaaaatttggaaagtcaatgctgatacctgaagaaagtcccatcagagatctgtgacctgaatcttcataactttcacaggccctttctaaatgccaaggaggatgtgtgtggagaagaatatgccacctatggcatcccaatatgcctgtgcccgcctgctcttcaacaagggaatgaaacctgggtattctcataggttttttaaagcacttgtccacatattttattccgcaaataacacaatttaaaattcagctagaatttgccattttctgtcagggttgtgcatttcttccagtcaccatgacttcctgagatagccaaaacacaaaatttaaattgtgtttaaattaaataaacacaatttatgctgaagctgactttacccactctgttccaacattacttatcctcagcatctctgaattcaaatatcagccaggtgtggtggctcatacctgtaagcccagcactttggcaagccaagatgggaaggttgcttgaggagttggagaccagcctgggcaacatagcaagaccccc

SEQ ID NO: 2209 - DNA, 32190 bp, Homo sapiens
cccttgccacttgaaagctatatccacaatattctttatgaagtaccccttccacctccagggaggtcactgaaattttatggtgtttatgaacctgtcatctgccagaggcctgggcccagtgaactccccctctctgattacccccttcgggaggcatttgagctcctgggattagagaacctggtgcaggtgtttacctgtgttcttttagagatgcaaatccttctctactcacaaggtaggttttccttggattttacattttccaaaaacaagtacttttgctcccaactactgtgtttccatggggtatattattagaaccgaataatgatcacagtcttttctgttttgtgtaaagggagcaggtatggtgggaccagcggctgagatgagactgctgtttctctttgaggtggcagtcagtgactgcagagagaaataggaaggaacacaagtgttaacttggctgatttgggtatatttatttattaatggaaatagcccttttttcctgataatatataatcgtcattaagaaaacattttttcttcatcataatgagagtgagagaactctgttactaccagaaacgtgtagacttcccattctttatggattagtaaaggttcacatcaaaactcagcgaacattgaaaagggataaatgaaattgttgactctgcagcttcctgaggcaatcaactttggatctttgcctgtgggagcatttcatctgagtgagagaaaaggtgagcaggcatgagacagatgactttcccaggtctaacagttctgccagagttgtgtgtgtgtgtgtgtggttttttgtttatgttttttaatctcagaaggaagttatctttgtggtatctttcattcaaagttcttccaacacatattaagaaaataacaaactatggattttattttaccagtacatttgtgaagactaatgctgagcctagactaggatactagttgtcatctgaatatgaatgtgtagagaaaatagagatgctatgtcttaatggatagtgaattgaaggaaattataaaatagtacctgtacactgatagattcttcaaaaaaggttacacaaatatttggattcacttttttttttagacaagttctcactccgtcacccaggctggagtgcagtagtgcaatcatgggtcactgcaaccttgacatcccgtgctcaagctgtcttcccacctcaccctcctgagtagctggtactataggaatgtgccaccgcatcagctaattttttattttttgtagagacggactgtcactgtcttgccctggactctcaaaatcctaggctcaaatgatcctcctgccgtggcctcccaaagtgctggaattacaggcatgaagcattgcacccaactggggttagcattttgctaacttgtatttaagctggcagaattgtagtgcaatcccgactggtgccgtcaagcttattttaccactttcctttttttatttttctattttaaattataagtggggctgagccaagtagactatatttgtacttccccatcttgtgtgtatgttgacactatttgtgtgttgacagccgttcacaaggttgtattttcttcagtttatccaacataatgttctttgataatgtgtttcatgtctcaatttttgttgtcaggaagttattctctaatgaccaatctaaattctttcctttcttctttcacccactttctttttatatgtatatatttaaaatatattttagtgaaacactttctcatcatctttagataaaaaaaaaatccattttttaatctgaagctccttgggcattaggagttaattgctttctgctccacagatttcagatgccactgcactaattccccagtgctcttgaggcagagcttagacatgtcctcctcagttggaaatccttgtggcaacttcaggggcttgattcttactgactgttaaaccactttcagttttgcattcactgaagcaatatgcttgtgaacttgatggatatgtgtgttttctaatctgagcatctttattatgtctttttcccaatatggacacctttttgtacttttttattctggtaacaatatgcagtttctgaggattctgtggatctccgtcatatttttcatgatctgcaagtgaaggctgaaacgctttatatggaattcttgacctggtaaatttgtgatgaatccaatctatgtaaacgagagacttcacaccttttgtcccagtctgtagttcattttgcctcttgagctactgacagcaaagtccctgccataagtgtggtggctgttctctttagagagagcgcctgctaaatattcagcatgaaccttcccaccagcagaagctgaggactcactgcttccattattacttacagatcacctttttgtatctgaaaaattttaccttaagtaattctctcttcctttcttccttttatttccctgaatggagtagggattagagaatggctagaaggggcagaggcttggagcttaataccttatggtgttttagcccattagaaaaaaataacttttttttttttttaagacagagtctcgccctgttgcccaggctggagtgcagtggcatgatcttggctcactgcaaccaccgcctcccgggttcaaacaattctcctgcctcagcctcccgagtagctgggactatgggtgcgcaccaccacacccagctgatttttgtatttttagtagagacagggttttcaccatgttggtcaggctggtcttgaactcctgacctcatgatccactcgcctcagcctcccaaagtgctgggattaccggcgtgagccactgtgcctggccgaaaaaaagaactttgtattctagacttagaagaaatcttaaaggccattttcttgaatcttgaagttcaatttatttatgttctgcctagagaagcaatttgggttagaaagaatattgggggtgggtgggttcttttgttttgcctttaatttttagagatggggtctcactgtgttgcccagaatggagtacagtgtattcacaggcacagtcttagcacactgcagcctcaaactcctcagctcacaccatcctcccatctcagcgtcccgagtagttgagactgcaggcacataccaccatgcctggtttagagtattggtttttgaagtcataacaatcctgggttcaaatgtctactctgtcatttattaactatacccatgggcgagttaggtaatcctcctgtgtgacagttgccacatctctatagggataatagtttgggttttttttttttctcctttctcactgatctattatgacaattaaataagaaaacgtgtataaaatacttagggtataattgacactgactaaatgatagctgatgctattataataattactagttttattagtcccatataatcttctataaattacacttatctctaagttgtgaaggttcaacatattactacatttaacataaaacctttttaaatgatacagtcaagagtttattccagagttgagaacctaataaatgttcttttatattgtataccatgctttttttagaaggcaaaaaaaaactccaaaagcttccattatcacacttcctcttttattttttatttttatttttttttattgagacggagtcttgctctgtcacccaggctggagtgcagtggcgcaatctcagcatattgcaacctccacctcctgggttcaagcgattctcgtgcctcagcctcccaagtccctgggactacaggcgcgcaccaccatgcctggctaatttctttgtatttttagtagagatgaggttttgccatgctggctaggctggtctcgaactcctgaccctaggtgatctgcctgccttggcctcccaaagtgctgggattacaggtgtaagccaccgcacccggcccacacctcctcttttaagtagcaggttatgtctcaccgtttgtggtctgtcctgagctctcctatttctgctctttttttgtttgtttgttttgagacagggtgtcactctggtgcccaggctggaatgcagtgacatgatcgtagctcactgcaacctcaaactccagggctcaagcaaccttcacccctcagcctcctgagtagctgggactacaggcatgcattaccatacctgactaatgttttttatttttagtggagatgaagtctcactacactgcccaggctggtttgaaactcctgggctcaagcgatcgtcctgcctcagcttcccaaagtgtagggtttacaggtgtgagccactgcttagcttgtcctgtttggtttgtggagtctgttcaggagttttagctcattaatatctaccaatttatttcagtttcaaatgaagaagaataagcatttatggatatggttttatactctatttttttgtaatctgtatgccgagaacaacagagtgaatcctgagattatagagctagatttttaaaaaatttaaagtgacataccccaaaaaattgccatacagtaaatttataaccattcactaaaatcactctatgttaggaattgtgctacaaaaaggcattgtatattttggatcttttccctacatttaatcctctcaacagcagtgagttagtgctgttgtgcattttttgttgaggaggagattgaggcttggggaaactaagtaatctgcccaagatgatacagctagtaagtaatgtagtactactaagaattgggtttcatcagtcttttttcagatgcttaaccactgtgttaactgtattgggcactgcacttaacctctccttatctgtctcaatatttatttttaaatgattaactcattctgtgggtctattgtaaaggtgtcatgcgaagtaattgtagagtataaaatgaaagcgctgtgtaaatctagattttaatattgacaatgtctcttctattagagaaaaatatttcagttaaatgaatgaaataggtgtccttatgttgatttgtacttgggtgccctcctttactcttcttaactgtgttaagggggttttaataacatgtgatacttcatttcttactcactgataaagctatgccataaatttaaaaacattgcgtgtgctgaagagttaccatgaaaacccaaagtgaatcaaagtaggtggatttcagtgatgaaaatgtccttctagactgatttgaaattctgatccacagcccatttaaaccaattcaatctgttatttaggaaatgcatatatcactgtcactttgcagtggtaactagctagaaattctaagtagagaaaatgtacccaggatgtgaaggctcttttctaggaccccagatcagaaatgggcactttgttctgcaactgggaaatacctggagcagcacagtatgaaaatcagagtatgattcttttttcaaagaactagtggaagaataaaaggggaatttaaacaccattgtctaacttttgataccaataattgaagtctaagaaacatttttgggccttgcttacctcctttggttcttcatagtggaaataaaccactacccacaccacactgcatgcctgtgtgcctttgcagtgcttgtctgccatccctctgttcgtttcattcctctttgagttgtatgtgaattaaccttgtcagaaggtggaagctacttaaagttttcttgaaaaagttgggagctttctcatcacaaattgctaggcatgctcaagtggacatcatagttctccttggaactgccatccataaaccaaacagtactttgctggtcaactgagaggtatttatagggcattgtccaagtgacaattaaatgcagaaggttctcctacagttccaaagtcagtccaagggaaaaagaggctccctatatgtgagaatctcttccttgcattcctctggtaacaagatccagtataaaccatttctttttcaatagggatctcttttgggcactgtcctctcccattagagtgtttttccaaaatcgccttagataccgtggatatttcaagtttcagcattgttttatgtccttcagtcataggggcactttaaatcaatatccaatagcaaacttagtagttgcctctgaaatggaaagtctgtagtccagcaccctgatagttgtcactgggaggcactcgcaggctttcgacataagccctagcccacactccacatacagagaatttgtctgtaccagtgctccagcttctcggttctacactgcgtgagctcaggcaatctaattcattcccatttagcatgtccaattaataatgcttgaagggtagattgacactgtgccctctgttttactgtactaggtaggagaaatggggtgaaacagtcaaacctaagatccactcccataaaacatttagataaagtgtgtttaaacattccaatttcattcaaacttcctccttaatcctatcaaccttaacactttaatatattatcattctaattgtagcctgcgttaaggctgtaagccactgtgttgaggcaatggctcctgcctgtaatcccaacactttgggaggttgaggcaggaggatcacttgagcccaggagtttgagaccagcctgggcaacatagcaaaaccccatctctactaaaatacaaaaattagctaggcatggtagtgtgcacctgtagtctcatctactacaggggctgaggtgggagatcgcttgagcctgggaggtggaggttgcagtaacctgagattgtgccactgcactccagcctgtgtgacacagtgagaccctatctttttttttttaaaaagacttcactagaagattttggtgcaacagcatataaggctctcaaatgagtcccagaaacttctccatcccttgattatttgacccactcctgtgcattaggttttgggtgttcagcaaggtatcttggcccttttgtgagtctttattttgattaatttaccttactatatatccccaagcaattccagatcatgtttctaattgtaatctttcccttcttacattttaaatttctctgtgctggggcaaatagagcagatttgtttgagccctttaattttgggaaaccatctgagggtccttatagtccatgcaacctttggtagtgctatattaagactttcatttcaggctgggtgccgtggctcatgtctgtaatcccaatgctttggaaggccgaggtgggcagatcacctgagttcaggagtttgagaccagcctggccaacatagggaaaccctgtctctactgaaaatacaaaaattaggcaggcatggtggtgtgcccctgtaatcccagctacttgggaggctgaggcaggagaatcgcttgaacccaagaggtggaagttgcaatgagccgaggtcgtgccactgtactgcagcctgggagacagggcaagactccatctcaaaaaagacttttgtttcagtcccatcaaggtctgttttattcaccctatttcttaatagacacttaaaaatttccaccctgctgggttgagtcctttgactcattattaatgtttttattagcatctgtaagatgagagtaagctgagatagcaaattcaataaggcttctcgtaatgttagattttgaagcagtaaagttacatggagtgcccacataaaaggagcctccctaaccgcagcatttgccctgggtaacggatgtattcagcgggtgaatatcccgattatcataaagccagtcctgcgtggcttttgtgcagagcatatcagcttcttcatctggggtgttccacttggaatttatagggggaattgggcagtctcccttctcaaggtaaacagacttcgagtagcttttatccagtccttgagactggctggtccctcaaggattggataaaacagttcaattcatttctgactgaatcatcacctttgtgtctggatcacatatagccatctgtgattgttccatagtgagctgtgggccctgtgtcaacccaagcatgttcttccacgctgcagcatttaaaaataaagatactgcctcgaaattagttcctgtagcagagattcatcaggaagtggatgatacttatctataaaatgagacttcatactatcccctggtttctgttgagggcaggagttcaagaccagcctggccaacatggtgaaactccatctctacctcccttgtggcagattgcttgaggtcaggagtgtgagaccagcctggccaacatcacgaaaccctgtctctacaaaaaaaaaaaaaaaaaaaatacaggcatggtggtgtgcgattgtaatctcagctacttgggaggctgaggcccgagaattgcaggttgcagtgagctgagatcatgccactgcattccagcctaggtgacagagcgagactccttctcaaacacaacaaaattatgtggaaacaacaaagagtgtctctaagatctctggtcaccagaaaggtactccacatgggggaaccacaaaaccaagaaactacagaatacctaagggtgttggtgaggaaatgcccaggcggtttccacataatttttcccgttgggagtggctttgaggctagttgtcacgccctgaccagcagaaatctgagcttggtccagcatcaaggttgacctagcactcttttaaatttcattttagcttttacatagaacaataaccaagggattttatatttaacttttttctgttggtttgcatttccttatatatccagtgaatcccactccctgggaggtggattcatctctaaattccattagttacttttaccttcagtaaatggtctcagcacagctactgctccatcccatgagtggccacccaggaattaaaggttcctaattccccaccctctcattgtccctcttcccaaaccacaggtttccatgagcctgggctgttataacaaatctcagtttttctgacaccaagtgagagagtctttcctccccaacacctgtcaatttgtgataccaactggatgcccaacagttcaattcattcctaactgaatgtcagactccacaggtttaagagttcattctcacaagactgtcctcacttctgatgccagccacaaatgaggtatcaggtgtcttggtttatttgtgttactgtaaaatacctgaggctggttaatttataaagaaaagaagtttggcctggtgcagtggcttacacctgtaatcccagcactctgggaagctgagacaggcagatctcttgagcccaagagttcaagaccagcctgggtaacatggtgaaaccccgtctctacaaaaaaattaaaaataaggccgggcacagtgtatcacgcctgtaatcccagcactttgggaggccgaggtgggtggatcacctgaggttgtgagttcgagaccagcctgaccaacatggagaaacctcatctctactaaaaatacagagttacccaggcgtggtggtgcatgcctgtaatcccagctactcgggaggctgaggcaggagaatcgcttgaaccctggaggcagagactgcagtgagccgagatcgcaccattgcactccagcctgggtaacaagggaaactccatctccaaagaaaaaaaaaaaaaaaaagccagacatggtagtgtatgcctgtagtcccagctacttgggaggctgaggtcgaggatcacctgagcccaggagttagaggctgcagtgagccattattatgtcactgcactacagcctcgtgacagagcgagaccctgtctcaaagaaaaataaaagaggtttatttggctcacagttctgtgcatgtgctagcacctgcttctgatgagggccttgggaagcatctactcatggcaggaggtgaaggggagccagaatcacatggcaagaggaaggaagcaagagagaggagggagatgccagactcttttcaataaccaattttcatggaaagtaagagtgaaaaactactcactcacaaccatgagaatggcacaaagccattcatgagagatccacccccaggacccaaacacctcacctccaacattggggccaacaaaccatgtccaaaccgtagcaccaggccacatacattttttcttggatgactacaaaatcaggggttccccaacaccatcccccaacccctcaagttctataaattcccagaatgattcacagaactcaagaaagcactttacttattgctaactggtttattataaaggatacaactcagaaacagccaaatggaagagaggtgcaaaaggtgtaggggtgggtgcagaactgctatgctttccttggacttacccagcaccttaatgtatttgccagtccagaagctcctctatatttcttcttcttcttcttcttcttttttttttttttttgagatggagtctgtctctgtcacccaggctggagtgcagtggcgtgatcttggctcactgcaacctttgcctccaggttcaggtgattctcctgcctcagcctcccgagtagctgggattacaggcacatgccaccacagctagctaatttttgtatttttagtagagacaagttacaccacgttggccaggctggtcttgaactcctgacctccagtgatccacctgcctcggcctcccaagtgctgggattacagacctgaggcaatgcacctggccacctctatttttttcttgaataaatttttgttccttgctattttctctaagaaaatttttattaagctttcaatatattagcaaaaagtcttaatatttccttgttttcttgacccctgttatatctgtagttttgtcctccttttcattcctaatactgtttgtgcattctctttttcccccaattatttttacctgaagtttgtcaattatattacttccttttgtttgtttggttttttgagacagggcctcaccctgtcgctcatcctggagtgcagtagcacgatctaggctcactgcagtcttgacctccctgggctcaggcaatcctcctgccttagcctcccacgtagctggagctacaggtgtgtgccaccatgcctggctaatttttttttttattttttgaaatgacagggtctcactgtgttgcctagactagtcccaaactcctgggtccaagcgatcctcctgcattggcctcccaaagtgctgggatcacaggtatgagccattgtgcccagccctattactctttaaagaaccagattttactttcattggtatcttctgttgtacctttgttttctgttttattaatttatggttttgtttttattattcacttctttctactactttttttgggcttattaaacctttctttctccccacctgcccaccaaaaccagtatcttaagcacttgagtcctgtgttagctacatcccacaagtcttagtatctgatactttcattatcattgaattctaaaaataaataaataaataaataatttgagacagggtcttgctctgttgcccagactggaatgcagtggtgtgatcacagcttatggcagcctcaacttctcagggtcaggccatcttcccacctcaacctcccttgtagctgggactacaggtgcatgccaccacacctggccaatttttaaattttttttagaggtggggtctctgtatgttgcccaggctggtcttgaactcctgggctcaagcaattctttcacctcggcctctcaaagtgctgggattagaggtgtgagccatcatacctggctagttctaagaatttttaaaatttcatttattttggccatttgtcttgcttttctctctctctctgtttttgatgttttgaattgatttaaatttttttctcattgcagttttttctgtttagatgttatatgctctttttcttaatgataaattttgagatttcaacatgaacagttactcttatgttatagaatcttcacagataactataaaatgctttaactccatgcccattgtggcttacttgttatgattgttcagttttaataatccctcaaattagacatttttattctatacacttggttttgtttaaatttactcatagtgaccttattttgtttttctttgaaataaggtctcactctgttgcctaggctggagtgcagtgatgcgactgaactcctgggctcaagcaatcctactgcctcagcctcctgatagctgggactacaggcacacgccaccatgctgggctaatttttttcttactttttttttttctttttgtagagatgggggtctcactgtcttgtccaggctggtcgtgaagtcctgggctcaagcagtcctctgcctcagcctcccaaagtgctgggattataggtgtgagccactgcacccagcctcagttattattttttgaaaattcacattttatttcatatcttagagatttcttttgagatcagtcttcttcctaacatgtgttcttagaagttcctttcctgagatagctttctctattagatcttattttgtccttgtttttgaaaaatagttcattggatgttaaattctatgttaaaagttttttttttttccttagtactctgaggataatattctatcatcttaaatagttcattggatgttaaattatatgttaaaagtttttttctcttagaactctgaggataatattctatcatcttctggtttcctgtattgctgttgagaagtcagccatcacctctaatgtcattctaatgaatgactctcattgttactcattagccagaaatctgtcttttcaactctggttatatttaagattttctgtctttggtgtgtgatattttgactgatttatctgaatgaggctttatttgttctgcttgtggttcattatgtttcctgaaatttaagaattaatgtcctttacccattttggaaaattctcaactatctttgtaaatattgcattcatgtatctttttttaatcctcctgaaattctagtgaaacttttttttgttgttgttgttgttttgtttttgagacagagtctcactttattgcccaggatggagtacagtggtgcaaactctgctcactgtaaccttcgcctcctgggttcaagcaattctcctgtctcagcctcctgagtagctgggactacaggcgcatgccaccatgcccagctaatttttgtatttttagtagagacggggtttcaccatgttggtcaggctggtctcgaactcctaacctcaagtgatccacgcgccgtggcctcccagagtgctgggattacaggcatgagccactgtgtccagccttaaacatgttaatctgtcttgctcaatcttccattatctctcaacccttttttttttggagatggagtctcactctgttgccaggctggagtgcagtgttgcaatcttgtctcactgcaaactctgcctcctgggttcaagtggttctcctacttcagcctcccgagtagctgggaccacaggtgtgcaccaccatgaccaactaatttttgtgtttttagtagagacggggtttcaccatgttggccaggatggtctcgatctcttgaccttgtgatccgcccgccttggcctcccaaagtgcttacaggcgtgagccaccacacccagcctcattccaattttctgtgtgtctctgtgctgcattctgggtaatttctccacatctgtctcctgctttatgaattctctctttacctgtgtttaatctacaattagccctttctttgacattttttggtcacagtgaagcttgttacagacaaacatgtttaggttgggtggcttaggtggtgtggtggctccacattgatgtcatactgaggacaggggtcaagtactccatgattagtctttgctcttacttcaggagctgccagaggctgtgcctttcattttctagtgccgtaggtcattgttggcaatacctgagatgaatttctgtgaaactagggagataagccaaattatgcatgtgtctgagacctcaaagccaacataattcagataatgctcagtcacattgggccaggcgcatggctcacgcctgtaatccctgcatttagaaggctgagacaggtggattacttgaggtcgggagtttgagactagcctggccaacatagtgaaaccccgtctctacaaaaatacaaaaattagccaggcatggtggtgtgcacctgtaatcccagctgctggggaggctgaggcaggagaaccacttgaactcaggaggcggaggttgcagtgagccaagttcatgccactgcactccagcctgggcaacagagcgagattccatctcaaaaataaaaaataatcagtcacagcatccaggatcataggtgtataatcctccagctacatcaggaagtccaccagaggcatgctggataccaccagcagcttcacatctccattggcagtgcttggcagggcataagccttgctagacacagctcctggtctgcaccaccatggctcctgtgccgccagccacaggtccagacctagacccctctgttgcccttgaggggctgaccttattctccacagtgatgctggtggacagcatggcaggggctgaggcagcagaggccattgccaccttgggatctgtgccagagccatcactaggcacatttttgacagtatgtttttattgtataatatagtcaagcataattttttaatgtctacttttatttcattttacatgccttagatgttaacatattaatttctcaaagcacgtttactggctactcatcatgtagtaggtcatatgttgaatgttaacaattctgagattagaaatacagatatgtccaggcacagtggctcatgcctgtaatctcagcactttgggaggcggaggcaggcaggcagatcacttgaggtcaggagttcaagaccagcctggccaacatggcgaaacccctttctacaaaaaacacaaaaaattagccaggcgtggtggtgcacagctgtaatccaagctactcgggaggctgaggcatgagaatcacttgaacctgggaggcagaggctgcagtgaaccaagatcgcaccactgcactccagcctggacgagagagtgagaccctgtctccaaaaataaataaataaaaagaaaaatacatatattgctctctaggagatgatggggtattggggaagagagaccatgaagagagaattatgatagaattgtaatgtttcagtgagatgaataattcctgggatggaaataaagatagggtactgttgaagcatgtagatagtactctggtgataataagaagtgttagggaaggctttccaaagaagcaattgcctgaggaaaaagtggaacctagtcaggcagtgcaagaggaagggacattctgggcagaggaaaacaatatacaaggggcacaaggcctgtgaaaacatggactgcaagcaagtggtcttactgcatatggagtgatgataaggaatgaggcagacaagggccaaatcatgaagagcctcatgtgccttgctgaggcctgtcttaaatattaaaataacttcttttatacattcatcactttgagtatcaattataaaaagactttcctaaaatatttaagtttaaaaaaaatgcttaaagaagaaaactctgccttttatttcttgattcagttaaaaagaattgtcttatttctgctgagtaattgcattattaaaaagcgtgtgggctgggcacagtggctcacgcctgtaatcttagcactttgggaggcaaaggcgtgtggatcacctgaggtcaggagttcgagaccagcccggccaacatggtgaaaccccatctctactaaaaatccaaaaaaattagccaggtgtggtggcgtgtgcctgtaatcccagctactcaggaggctgagtgaggcaggagaatcgcttgaacccaggaagtggaggttgcagtgatccaagattgagccattgcgctccagcctgggcagcaagagtgaaaactcgatctcaaaaaaaaaattaataatgtgtgtggtacttcaaccagtcttgaagagaatacagaactggaaagaagaatagacatagaacactcacaacacatggatggaataaaatctaagcatgtctttttaagttatagatatctagcaaaattatatatattcttatcccatcatcatctattcgttcaaaaatattgttttagcctctattatatgtcagatactgtggtagatactgaggttacaagaatataaaaggccccaatccttggttgaaatgatggccacagagcagaatctaaggagatttctctggatttggtcttcatagtctataactgtaaattactgtctctgcctactcctggtgagtttttgttgttgttgttgggttttttgtttgtttgttttttgtttttttgagacagaatctcactctgtcacccaggcctggagtgcagtggtacgatcgcagctcactgcaacctctgcctcctgggttcaagtgatttcttgtacctcagcctcccaagtagctgagattacaggcatgtgccactatgcctaatttttatatttttactagagacagggttttgccatgatgggcgggctagtcttgaactcctggcctcaggtgattctcctgccttggcctcccaaagtgctgggattgcaggtcttgagccactgtgcttggctttttgttttttgtttttttttctgagacggagtctcactgttgcccaggctggagtgcagtagtgcaatcccggctcactgcaacctccgcctcctgggttcaagcaattctcctgccttagcctcccaagtaactgggattacaggtgcctgccaccatgccctgctaatttttgtatttttagtagaaatggggtttcaccatgttggccagactggcctctaacttctgacctcaggtaatccacccacctcggtctcccaaagtactgggatcacaggcataagccactgtgcctgcccggcctttttttgtattttgttaggattctgttgaacttaagaggaaaaaaaacataacatttagtagttatcagtaaattttagtcagcactgggtgtgaagtgggccctatgctttatgggtaaaatcagagaaagtggatgccactctgtccttaggaaacccacagagaggagagacagtacgggggccaagtgccataatggagtcctgtgatagtgcagaacttcaattagttctgattagggcacagtttctacttctaggggccatccagccgacctcaggggtttcaggtcagcttttcatcctcaccccgcccccgcccctgggataaaagacccatattgcctacagttcaaacatctgcctgattatcctagcagagtggtaggaactgattttctgatctcctctactacccgcctcacctgcacagagagtaccagctgtctcagcctagcttcttcagtgggccttggctgtaaaatgtgtgtatccaccccaggtaattaggttagctctttgtgctcgtatgactgacccctaccttttaggccacctggtgtttgttctagaagttattcctataaacagattttcacctaaaatttgaatctttatgaatcaaataaggaaaattttaagtaaacttgggctgtggataactgatgattcattaccaaaaaggtagtcatttaaaattataaaatgacacaaaaaatttaaatggaaaacatcctgtttatgcttggtcaggtctttgagttgatgtgactcaagtaacatctgatcattttcttaacctttttaaaaagactcccctaaattcttcctcccaaagattttactgtgtttgttcacagtgggttctgtgaaaggattattacaagcccacaatccattatcctcaattctacaaatccaaaaaattctgaaaaccaaacattctttttgtaactcattcatcagcaaaaccagacctgaaccaaagtgaccctattcatattctttgattatctgtcctactgggacatatatggtttgctgcagaaatattaatgtatttaattataggatactgccctagatagttcatatatgtggtatatgcaccatactgcttttctaaattaaaaaatctgaattctaaagcatatctacttccaaacatttaaatcggacttgtggacatatgtaagtataaagcagcctttgcagagtggtttaaaaggctgctttactattgtggggagcttttaattttgataaactagtgagttcatgtaaataaaacataacaaaaacactaatccttaattttctgttaactcgagaatacccagatatgatagttttgtggctaggggttagacatagaaagtgtaactatgaatgcatgtatctgtttgacttcttgtacccccaaaataaaggctaaaataaatataatcagctaaccaaagctatagccacagtcatatatactgtgtaagaaaaaagcctctgatggaggttgcagtgagccgagatcatgccactgcactccagcctgggcgacggggccagactgtctcaaaacaaaagaaaaaagaaaaatgggaattgtgtaagcattcatgtataaaaaaatgatcaaaaatgttacactggcctggtgcggtggttcacgcctgtaatcccagcactttgggaggccgaggtaggcggattgcttgaggtcaagagttcaagatcaccctggccaacatggagaatccccatctctacgaaaaatacaaaaattagcctggtgtggtggtgggcgcctgtaatctcagctacttgggaggctgaggcaggagaatcgcttgaatccgagatgtggaggttgcagtgtgccaagatcgcaccattgcactccagcttgggcaacaaagcgagactccatctcaaaaataataacaatgttacactgtatcttgtacatttttagtgggataaatgccaagagcagttttattagttcttgattcctccacactttaagagaatataagttcgtctacccatgattttaagaagcaaagagtgtgatgtttcccacctacccacacccccttaaaactattcaaatgaaaccatttaattctttaattatagtggaatagaactgacctattttctgtatgatcataaagaaatatttacttttaacgcagaaatttttttcttaagatccacattttccagcttaatgaagtgattgtgtttttacttggactcttccctttcctttttccttgttctgtgcagattatcaacgcctgatgactgtggcagaaggcatcaccacacttttgttcccatttcaatggcaacatgtttatgtgcccattctacctgcttctctgctacattttcttgatgctcctgtcccttatctgatgggccttcagtcaaaagaaggaactgaccgttctaaactagaacttcctcaagaggtaaaactacaatgaatgatgaagcatttgctgtttgctgatttaggtcaaggcgactttcgttagattgcattgtctttgtcaaaattttatctgtctctttgactctcctaaatctccaagtatggctaggggagagcctgagctatagaatgcagactcttgatgatgactactacatagtcattaaacctggtttaaaacaagacagtggctgattttcacaactataaatttctgaagatggagcagtggtagcatgatctcattgctttattctagtaacatattttttttctttattcacgttataaattttgtttttaaacaatacagcccaggttttagcatccttaaatcattgtatcaattgaattttatttttgacctctatcaaatgaaaagtaacatgttgcagcaaactagggataatggaaatatcaaacacttcagtattctctgttttcagatacaaggccagttatttgttctaaatgtcagcttggcttggtggttgagataaaaattctaacacctagtttttatgccaccttaaagttatactttctgtgtgttgtactttcaaatgtttaaaaaaataggccaggcgtggtgggattacaagcgcttgtaatcccagcactttgggaggccaaggtgggcggatcacaaggtcaagagatccagaccatcctggctaacatgatgaaacccatctctactaaaaataccaaaaattagccaggcatggtggcacacacctgtagtcccaggtacttggaaggctgaggcaggagaatcgcttgaaccctagaggtataggtttcagtaagccaagatcgtgccactgcactccagggtgacagagcgagattccgtctcaaaaataaataaataaacaagaattattgaaagcatatttctgatctataaagtaagaatagtaacacctcctaggtgttgtttttacttttttttttcttttcttttgagatggagtttcgctcttgttgcccaggctggagtgcaatggcgggatcttggctcaccgcctcctgggtttaagtgattctcctgcctcgtcctcccgagtagctgggattacaggcatgcaccaccacgcccagctaattttgtatttttagtagagacgggttttcttcatgttggtcaggctggtgtcaaactcccatcttcaggtgatctgcccgccccggcctcccaaaatgctgggattacaggcatgagccaccgtgcctggcctaattgttacttattgttaatggtactgaggattaccatgtaaggtctttgaaatgaaatatggataagagtgtgccacagccttttacaaaacataagatgattaattacattatatcactagctatttaattcacatctttcttaatagaatctcatgctgagattcacctttatttgttcttatttcccatagagattctcattttaataagtgaatttaacacactaagccacagccattatttcctgtaatgattctcataatcatccactgcttacttttattctaatgaatatttccccacaaaaattaaggtttttgctcaaaggaaaatagcatgattcagatcacataagagacatatacagactattgttctttttgggcttgtgcatgtttttcttctctgttttacctcttttctctattccttgaatgttcttgtttttgctttcattaaattagtcaagtatgttatttgctccaagaagttaatcctttaaattttcaaggaaaaagaaatagactagccaaatgcattttgttttgaagacttaatgatattttagtttcttgttgagtgactgatctattttgtatgttaatccatgtaatattttataagataatttatatgtatgttgtctttccatttttcataacaattgttgagagatttttaaatggcagcttgatatatctgtagttgggaaacctttccatctctatgcctgtttgtatccactaaagataaacaaatttaaggattctgaaagctcctacagtaatgtctgtgattttctaatttttcattaatgagatcaacactgcttaataaatacgtatactcatctgttcatagagtagaataatatgaaataacctgaattagctgtgaaaatagcagtgcttcggctgggcgtggtggctcacgcctgtaatcccagcactttgggaggctgaggcgggcggatcacgaggtgaggagatcgagaccatcctggataacacggtgaaaccctgtctctactaaaaatacaaaaaaaatagccgggcgtggtggcaggcgcctgtagtcccagctactcgggaggctgaggcaggagaatggcatgaacccgggaggcggagtttgcagtgagccaagatcgcatcactgcactccagcctgggcgacagagcgagactccatctcaaaaaaaaaaaaagaaaagaaaatagcagtgcttctgtgtagaaactataaattaggacatcattgttttataagaaaaggctaacagcctctttgttctggtatcattttacaatgaggtgaaataatctgcttcacataattttggagaggaagtagatataaaaatagtcatttaaaaaaatgacttaaatgcactcactagtaatactttcctccacctttccctgaaaagtctaaaataaaataatggctaaaaatagtgacaagacttctaaacatagttacaaaaataacaaatttgcaaaatgattattttaagaaggtatgattttagttgctagctaactaatataactacatagatttataaattaatcaccaattagctatcctcatgatttaagagtgatacccacaagtagccatttgtaatactgttttttagggagtaggatagagagaatgagagtggaaggaaggcactgaagattaattgcatggaatgtacctcactttctactgttcttactcatcttcacagtaactggtagacaaaaagttaagagaaaaactgaaacagagctgcttttgcaactttgttcttgtcatatcttgccctgagattctgaggaaataatttattttattttttagacagggtctcactctgtcacccaggcaggaatgtggtggcacagctcactgcagccttgacctcctgagctcaggagatcctcccacctcagcctcatgagtagctgggacgagaggcacacaccaccacacccagctaattttttaaaattattatttgtagagatggagtctcactacattgcccaggctggtcttgaactcttgggctcaagcgatcctctggctttggctttccaaagattaccagcatcatccacagcatctggcccagagggaatattttaaatgctctcctctctctggcttaccctcaagctggcttaacttcagacactgagaagtgagatcacttactaaacatgaagagagctgcattagtctctcatttgtggatacttcctgctccggcctacagttttagggttcccccaaatgaccatctcctcagagcttattctttcatttgccaaacagttgtctcatacactatttgtgtagaatacagtgggagacaccaagtcaaaaagaggtgatttctgcttttcaaaaaagtcatttacaaataccaataacacaagttaaaaagtaagtcagtaagaggaatgaatgaacagagaagatccagaggagatcagaatgcctttagggtaagggtataggaaggtttcatgacagaagagatgattaagctttaagcctttgttttcttacttttgagggaattttttttttttttttttttgagacggagtctcactctgttgcccaggctggagtgcagtggcgccgtctcagctgactgcaacctccacctgccaggttcaagtgattcttttgcctcaacttcccaaatagctgggattacaggtgcacgccaccacacttcgctaatttttgtatttgcactagagatggggtttcaccatgttggccaggctggtcttgaacttctgacctcaagtgatccacccacctcaggctcccaaagtgctgggattacaggcatgagccactgtgcccggccacttttgttgttgttgttgttttgtttttgagacggagtctcactctgtcgcctgggctggagtgcagtggcatgatcttggcacactgcaacctctgcctcctgggttcaagtgattctcctgcctcaacctctcaactagctgggattacaggcgcctgccactacgcccagcttattttttgtgtttagtagagacgggctttcaccatgttggtcaggctgatctcaaactcctgaccttgtgatttgcccaccttggcctcccaaagtgctgggattacaggcatgagccaccatgcccagcccacttttgttgtttttaataggaagtagttacatatcatgaaggcttgtgagcagtgttgatcagtagaaatatttagtcctaaagcaatgtcagattgaggtgttgagtaaatttttatcatgtaatacttattgagctcttctgaattttttttaatttaatggtgttaaaagtgagaagcaacttatcagaatgccctattatagagttctcgtttgttttggagaaagggctttttggttttcttcaatacattttcataacacagtttgtatttcctgttctactttgagataatcaaagccccagcttgggcccttcttaagcagacataggagacttttgtgggatcatgaagacagaccagtagctatggtgttggaactcctactttgtagtacactcagctcagcagtgatttcatgaccataataagctttaaaatttcagaaaatgtatcattttcccttttcataggaggaggagagggatagaaaaaggtagtaggaaggcattagtgaaggtgatagtacaaaatctaagtggtgggaggttgctggttaacatttagattagcaaattagtaaattttttcttccattttaaagatactgaattggccgggcgcggtggctcacgcctgtaatcccagcactttgggacgccaaggtgggcggatcacaaggtcaggagatcgagaccatcctggctaacacggtgaaaccctgtctctgctaaaaatacaaaaaaaattagccgggcgtggtggcaggcacctgtagtcccagctacttgggaggctgaggcaggaaaatggcgtgaacccaggaggcagaggttgcagtgagccaagatcgcaccactgcactccagcctgggcaacagagcaagactccatctcaaaaaaaaaaaaaaaaaaaaaaaagatactgaatcatccattcaaattatgtgaccttcatttaagcctttcagtgtaaagaatggtgtaggccggccaggcgcagtggctcacacctataatcccagcactgtgagaggctgaggcaggtggattacgaggtcaggagttcaagaccagcctggccaagatggtgaaaccccatctctactaagaatataaaaaaattacccaggcatggtggtggacacctgtaatcccagctacgcgggaggctgaggcagacaattgctcgaacccaggaggcagagtttgcagtgagctgagatcgcaccactacactccagcctgggtgacagagcaagactacatctcaaaaaaagaaaagaaaagaatggtgtaggcagtgctactgtcttcagcaagatgcgacatttcagctctttatttatttagagaaaactgctgacattggaggtgaggaaaaatagcagggaaaggccataagccaccaggctgtttgagggtgcacatttggaacaggtgccaggaagtcacctaatttcttgggcctcggtttcttcatctgcaaaattaaaagactggattcaaagattacatcaggctttaggaatcattgttgatcatctggctttgaaaggagggaaaccgaaatttttttttttttttttttggccaaagtctcgctgtgttttgcccaggctggagtgcagtggcacgatcttagctcactgcaacctctgcctcctgaggtcaagtgattatcctgccttagcctcccgagtagctgggattacaggtgcatgccaccatgcccagctaatttttatatttttagtagagacagagtttcaccatgttggccagactggtcttgaactcctgacctcaagtcatcctcccgcctcagcctcccaaagtgctggaattacaggcatgaggcaccatgctaggcctcattttgagtttttattgagcttaatttagagtttcactatgctgcttgctaattggtatctaacatgaagagcaaggatcaaaagagaaaaacaaagacccgactggttgctttcccctttccccttactttgccgtctaggatcagagagcagtgtgaattttccccttggtgcctgggggtgggggagccagggagaaacacatagtgaagcttcctattttgtttattaacttccaccccatgtcttatgttcaaccattgatgtaatcaatattatttttatgtgatgggctacacttttggcactccaccccccaatctagaaacacaaccttctttttaactaacaaccttgtcctgattaagagagtatggacagtagaggttaaatactgtttgaagtctactacagatacctgagggataatcagaactttatacatatgcttggcctcttgaattttctatatctacttgaaaaatatttaaaatatttattcaaaataaattccaaatgtagagtgtaaacaaactcaaacatttcttctgatttctgtcacctcttctactcaactcaaaaatatcttgtgtgaactcttaattattcaaaggttaatcaagtgcatagttacatatgcacttgcctctaccacctctctctgcctcctgcattaggtataatgacttctgaaatggttttgctctaggaggtttagtgaattttgagtaaagttaaaatttgtggattatctgtgaattggattgattttgccagtttcatcctattgggagatactacagctgctggtttttggtgattattgtcaattctgcattacagatgttagagcagtggagtggcaaagaaagttcaagtgcatacagtgagcattttacctaatatcatgtatttgtaaggtcttatgagtctgggcacgcttacccacataggaatgcctaaatggatgccaattgttagaaaatcatattcagattataatatattgctgagacccagagaaaattattcatatatattaagtatggtataaaaaactcacatagggaaaaatgatggaaaaagaggttatttttaaagaataagaaattctaaaccttgcaaagattaacataaaaggcaccataatctatgcttttgtttgtaatagttggcaagaatttttttttctttttgtagaaacagaatcttgccgtgtttcccagtcttgtctcgaacccctgggctcaagcgatccttttgctttggcctcccaaagtgctgggattatgtgtgagccactgtggctggctggcaagaatatgttagcacatacaattcctttattttaaacctttgtatttcatttttctctttcaggctaatttgtgttttgtggacattgacaaccattttattgagttgcctgaagaatttccacagttccccaataaagtggattttatccaagaactctctgaggttcttgttcaatttgggatccctcctgagggcagcctacattgcagtgagagtaccagcaaactgaagaatatggttctgaaagacttggtcaatgacaaaaagaacggcaatgtctgtactaataacatcagcatgtatgagttactgaagggcaatgaaaccatagcccgcttgcaggctctggccaagcgtactggtgtggctgtggaaaaaatggacctctctgcttctctgggtgaaaaagacaaggatttaaaactgcattgtgaagaggcagaactaagggactaccagctcaatgtacagctccgagaggtctttgctaaccgttttacacagatgtttgcagattacgaagcatttgtcattcagactgcccaggacatggaatcctggctgaccaaccgggaacagatgcagaactttgacaaagtaaaaagaaccatagttttccttttgtggttattagtggctttattattgattttaacatttttaaattttttattcttctgtgcctatgcttacccatatattattgattttgttaaccttttttaaatgcagactttttgtcttccagccccattaagaacttttctttaccaagtatttttacattagataaaataattttacaagcaaataaaccagctcattgaactggtcattaaattgtgcgttaaattgcctgtaatctcattttcaatttttctttaccttaaagatgcttaaattatagaaactcaggccgggcacggtggctcatgcctgtaatcccagaactttgggaggccgaggcggacggatcacaaggtcaggagtttgagaccagcctggccaatatggtgaaaccccgtctctacgaaaaatacaaaaaattagctgggcgtggtggcgcacacctgtagtcccagctactcaggaggctgaggcaggagaatcgcttgaacccgggaggcagaggttgcagtgagccaagatagcgccactgtactccggcctgggcaacagagagagactccatctcaaaaaaaataaataaataaataaaaaattatagaaactcttacattttgcaggttttccaaatctgttaatactgtttaaccttataacagttttatttactcttactttatgatcaagtatggttaaataagcctactcctttttgaagaaatctctttatttagtctagaaatcatttatttagtctttatcctatcaggaagtcacaacttgtccatgtaaagttaacagtttggtttcagaagccaaatttctctatctcattttaagataaaaggagaaaaagagtgactaaattaagttttatggctgtaagtgtaaaacaattccaaagattttggaaagagaagtcagaaaatataccagctttccttgtcctgtgatttctaaggggtactggattcttctgccagttttttttcacctatctcccagattttatttttcagacagatgcacttagggttgtatagtaactcttttaggtcaccagggtacagtttagttctttactgctgtgattgctgaggtataatactgctattagaatgtatcatgggtttcactaagtggcctctttgggtcatgaaaggccttctaaaggggctgatacattccaagaggctaatctacagtactggagaatttttggaaataatgaaaaattttcgtaaaggtacatagtggctgggcatggtggctcacacttgtaatcccaacactaggaggttgaggctggaggatcatttgaggccaggagtgtgagaccagcctaggcaacatagtgagaactcatctctacaaaaaattttaaaattagccgggcatggtggtgtgctcctctggtcccaatgactctggaggctgaggtgagatcacttgagcttcagaagttgaggctgcagtgagccaagatgatgccactgcactccagcttgggctagcgagtgagaccctgtctcaaaaaaacaaataaaagataatttttttacttcatcagatattttttctgttggaggatgatattgtatgttgaacagttacgttctggtgttctttgtttttccccacatcagacaggtaatgttctaacatggtaacaaagtttgaggaaggtacatctcacacatgagcatgaaaagccaattattacatttatgaactacaaaagcatcctgatgcacttacgtttgagaaaacttctttaatattaacaagacttcacttctttaagtgtatgcccttaggttcctttttcgttagtcttaaccattttccatactttttcctatctagcttagaactaatctgtgggctgggcacagtggctcacgcctgtaatcccaacactttgggaggctgaggcgggcgaatcacaaggtcaggagatcgagaccatcctggctaacatggtgaaacctcgtctctactaaaaatacaaaaaaattagccgggcgtggtggcaggcacctatagtcccagctacttgggaggctgaggcagaagaatggcatgaacccgggaggtggagcttggcagtgagctgagatcacgccactggacgccagcctgggcgacagcgagactctgtctcaaaaaaaaaaaaaaaaaaaaaaaaactaatctgtgtatatccatggtttatccttgggacaattcaaattcttacctaaatcaagccctgatacttccttccttcttaatctttatgtagcctcaaactatataaatggaattctttttacataacccctaaagaaatgaaaattttctgttggattccagaaggcttataagtacctttcactaggaaaatctgcaggacatactagtcgtacaagccaaatcgttgttgacctaaaattttatagtctatgagggtctgaatatcaaaagccagatctttggcccactttttttaaaaaaaggctatttgatgtatgaaaagtaagatgtttattggtgaaggtgaactgatttctagactactgtgaatctttctgtggttatttggatttatgtatatacacctgaactatggaactacttaaagtgaataagtggatttctataaggaaattttaagaagacctcctaaatttcagaatgaaagtaaatatgctagcaagaagctgatgagtatttttaaaagtcaccttatgtcagaacttatttctctttcctctttcccctttccccttctggcttctgccatgcaaaaataaaaaccaacccagcaaccaaaataggaatttacttccaaatttacttccagattttagtactgcattgaatgtagaatccctgtacacacatgagcatggaagaacaacagaaaaaaaaatgacacttttaattaggaactgattacgatgtactgaaccatcccatgcatcagacaggctagtaacaggaaaggtgtacagcttattgtactcgttctccaaaggcttgcttctgatggtttttcaggcaatgatttgttttttttttgtttgtttttttggaaatgcggtttcactatgtttctttaggctggcctcaaactcctgggctcacaggatcctccggcttcagcctccctagtggctgggactgtaggtggccaccaccatgcccagcttccaggcagtgccttttttagttgttaaggctgagactgttgtgtcagcacaggtgtggaaggaatttttccttggcttaacactcatctattgatttctcacagagttaaagagtctagaaaagcattcacttaaagaagaacaaaagaacttcacccataagcataaattccatgtcttttttaagattaatgctgatgtgtttattgtatcagttaatcatctcactaccttgtggcttgaaagtatatttcataggctaggaatagagaacagaaggaattacaacttgtagccgggcgcggtggctcacgcctgtaatcccagcactttgggaggccgaggcgggcggagcatgaggtcaggagatcgagaccatcttggctaacatggtgaaaccccgtctctactaaaaattcaaaaaaattagccgggcgtggtggcaggcgcctgtagtcccagctactcaggaggctgaggcaggagaatggcatgaacccgggaggcgggagcttgcagtgagccgagatcgtgccactgcactccagcctgggcgacagagcgagactccatctcaaagaaaaaaaaaaaacgaaattacaactcattggggaaagggataaaaatttttaactgcaagtgaagtggatgattgacaattgtatagcaacttatctgccatctttcgttactgatgccctctttgctacataatggtcataaggatcagaatgtaaattttgtaaggtaagatcagtgctaaagacctaagtgacgtacattctctaaatttaggaaaatggaaagaaaagtggatttttaaggatttttgaatttcaagtgtcagttttataagatttaaaaaaggaatgtcctgagttaacataattttcaggcttatcatgtagtgttgagatggtctctttgcactaataatttcctaattatctcattacaggcttcctttctgtctgaccagcctgagccttacctgccatttctttcacgcttcattgaaacacagatgtttgccacctttattgataataaaattatgtctcagtgggaagagaaa

SEQ ID NO: 2210 - DNA, 1130 bp, Homo sapiens
gaaattgttgactctgcagcttcctgaggcaatcaactttggatctttgcctgtgggagcatttcatctgagtgagagaaaaggtgagcaggcatgagacagatgactttcccaggtctaacagttctgccagagttgtgtgtgtgtgtgtgtggttttttgtttatgttttttaatctcagaaggaagttatctttgtggtatctttcattcaaagttcttccaacacatattaagaaaataacaaactatggattttattttaccagtacatttgtgaagactaatgctgagcctagactaggatactagttgtcatctgaatatgaatgtgtagagaaaatagagatgctatgtcttaatggatagtgaattgaaggaaattataaaatagtacctgtacactgatagattcttcaaaaaaggttacacaaatatttggattcacttttttttttagacaagttctcactccgtcacccaggctggagtgcagtagtgcaatcatgggtcactgcaaccttgacatcccgtgctcaagctgtcttcccacctcaccctcctgagtagctggtactataggaatgtgccaccgcatcagctaattttttattttttgtagagacggactgtcactgtcttgccctggactctcaaaatcctaggctcaaatgatcctcctgccgtggcctcccaaagtgctggaattacaggcatgaagcattgcacccaactggggttagcattttgctaacttgtatttaagctggcagaattgtagtgcaatcccgactggtgccgtcaagcttattttaccactttcctttttttatttttctattttaaattataagtggggctgagccaagtagactatatttgtacttccccatcttgtgtgtatgttgacactatttgtgtgttgacagccgttcacaaggttgtattttcttcagtttatccaacataatgttctttgataatgtgtttcatgtctcaatttttgttgtcaggaagttattctctaatgaccaatctaaattctttcctttcttctttcacccactttctttttatatgtatatatttaaaatatattttagtgaaacactttctcatcatctttagat

SEQ ID NO: 2211 - DNA, 1131 bp, Homo sapiens
gaaattgttgactctgcagcttcctgaggcaatcaactttggatctttgcctgtgggagcatttcatctgagtgagtagaaaaggtgagcatgcatgagacagatgactttcccaggtctaacagttctgccaaagttgtgtgtgtgtgtgtgagcttatttgtttatgttttttaatctcagaaggaagttatctttgtggtatctttcattcaaaggtcttccaacacatattaagaaaataacaaactatggattttattttaccagtacatttgtgaagactaatgctgagcctagactaggatactagttgtcatctgaatatgaatgtgtagagaaaatagagatgctatgtcttaatggatagtgaattgaaggaaattataaaatagtacctgtacactgatagattcttcaaaaaaggttacacaaatatttggattcacttttttttttagacaagttctcactccgtcacccaggctggagtgcagtagtgcaatcatgggtcactgcaaccttgacatcccgtgctcaagctgtcttcccacctcaccctcctgagtagctggtactataggaatgtgccaccgcatcagctaattttttattttttgtagagacggactgtcactgtcttgccctggactctcaaaatcctaggctcaaatgatcctcctgccgtggcctcccaaagtgctggaattacaggcatgaagcattgcacccaactggggttagcattttgctaacttgtatttaagctggcagaattgtagtgcaatcccgactggtgccgtcaagcttattttaccactttcctttttttatttttctattttaaattataagtggggctgagccaagtagactatatttgtacttccccatcttgtgtgtatgttgacactatttgtgtgttgacagccgttcacaaggttgtattttcttcagtttatccaacataatgttctttgataatgtgtttcatgtctcaatttttgttgtcaggaagttattctctaatgaccaatctaaattctttcctttcttctttcacccactttctttttatatgtatatatttaaaatatattttagtgaaacactttctcatcatctttagat

SEQ ID NO: 2212 - DNA, 494 bp, Homo sapiens
caatatggacacctttttgtacttttttattctggtaacaatatgcagtttctgaggattctgtggatctccgtcatatttttcatgatctgcaagtgaaggctgaaacgctttatatggaattcttgacctggtaaatttgtgatgaatccaatctatgtaaacgagagacttcacaccttttgtcccagtctgtagttcattttgcctcttgagctactgacagcaaagtccctgccataagtgtggtggctgttctctttagagagagcgcctgctaaatattcagcatgaaccttcccaccagcagaagctgaggactcactgcttccattattacttacagatcacctttttgtatctgaaaaattttaccttaagtaattctctcttcctttcttccttttatttccctgaatggagtagggattagagaatggctagaaggggcagaggcttggagcttaataccttatggtgttttagcccattag

SEQ ID NO: 2213 - DNA, 254 bp, Homo sapiens
attttacattttccaaaaacaagtactttgctcccaactactgtgtttccatggggtatattattagaaccgaataatgatcacagtcttttctgttttgtgtaaagggagcaggtatggtgggaccagcggctgagatgagactgctgtttctctttgaggtggcagtcagtgactgcagagagaaataggaaggaacacaagtgttaacttggctgatttgggtatatttatttattaatggaaatagccct

SEQ ID NO: 2214 - DNA, 255 bp, Homo sapiens
attttacattttccaaaaacaagtacttttgctcccaactactgtgtttccatggggtatattattagaaccgaataatgatcacagtcttttctgttttgtgtaaagggagcaggtatggtgggaccagcggctgagatgagactgctgtttctctttgaggtggcagtcagtgactgcagagagaaataggaaggaacacaagtgttaacttggctgatttgggtatatttatttattaatggaaatagccct

SEQ ID NO: 2215 - DNA, 494 bp, Homo sapiens; identical to SEQ ID NO: 2212

SEQ ID NO: 2216 - DNA, 192 bp, Homo sapiens
acctcatggttttgttttagttctttgtttaaaatttttttttaatatgccatgttaacctttttaaagtgtaaaattccgttgcatttaattacattcacgatgttgtgcaaccatcatcactatctatttccacatttttccatcatcccaaacagaaattctgtacccatcaagcaataacttttcatt

SEQ ID NO: 2217 - DNA, 345 bp, Homo sapiens
ctcaacaccaccaaggaaactgagaccaggcctccaaagcctcaagctagaggaggctgggagttgtgcaaactccacaagtcaacagacaggaaggctgcaaggaaatctgtcacccccaacccctacacagagagccccaacccaggcctgacctcagtgtgggcacaaagctggctgctgaccagattctgagacccgggtttctgtccagaaccacaggagtcctcctccccctggcccccctccccatcttccctcttcccaactcacctcctgtggggtgcaacaggatgtccgctgggttgtgaggtttcaggcccagagcagacaggggtgtcttgg

SEQ ID NO: 2218 - DNA, 138 bp, Homo sapiens
tgcctgtaatcccagctactcagggggctgaggcaggagaattgcttgaacctgggaggcagaggttgcagtgagccgagatcgtgccactgcactccagcctggacaacaagagcaaaactccatctcaaaaaaaaa

SEQ ID NO: 2219 - DNA, 1187 bp, Homo sapiens
gcatatagaaaaccgtcccagattgtcttttctaatctatttttggaggaggtttttatatatcccatgttttatattatttctcccaaaccggattagatatagtgaacaataaaataaatgcagtttccaaaaccttggtgttcagaaatgaagggaaccatgaggggagtgaaggggacttgccctttgctctgtgctgtatgcactgcccagggaacagccccaggacacttctatagtttctttctgagactcacaaggtgttagcaatgctctgagctcactcaattgacagatacgtttaaggttctcaaataaatttcaaacttctaaatttttccttttcattgtgtgcataatgtacagattaggaaaatgatcttctaattgagaagtatacttcaaagtttggaaataaaatcataaaaatgttttcctaaacatagcctttttcaggagtttttgtggatatggtcaaaggcaatagctctaattatctggggtcctcaggacaggaaatgagctcacactcatgctctcaaactgtgtcacagcatttttggaaatattttcatttctattcaagaggaggaacaaggccccaagtgttcaccctaattgtagaaaataaacataaacatgaaattcacaaaagaacaactataaatggctgcaaatatgtgaaactatgtttaacttcccagggagtcaaaaaatactaattaatacaagaatcatctttggcccaccacattatgattttgtctgaataagcctcttcaatgctggcaaatatgaggtaaaatggctgctccggctgctctttttggctggtcttaaggggcgcaaatagctccaccccatttggaaagcacttggcaatggctgctaagactttagtgtttttcatagcttctaacctgctaagaagtagatacttgttcccattttgctgctgtgcaaacagacttgtagaggtcaagtatctcgtacaaggttacattgatggtgattgatggcgccaagatttgaacttggttgtgagtccaaagtctaggtctcccattctacccatgtgattttacacacatgcctgatataattagctcctcctcctctccagagaagggcagctgacctttgtttcccagttcagaaatcctggtgtgagttatcagctgggg

SEQ ID NO: 2220 - DNA, 388 bp, Homo sapiens
tggaagaatacgcaaacgaatgtttggtgtggaagaacgctggaggagtaaacttactatactcacaatttggattacaacatagtttggttaacccagctctggtgaaccaaatgtacaagtattatttccttatggttcatcttataaaatattttataaattggttgctttctttaagctctccacaaatgaaaaatcagtcccaaaaatctataaaagactatttcagcgttaattgaccattaaggaaatacatactaggctgcatgtggtagctcacgcctgtaatccccacactttgggaggctgaggcagacagatagcctgagctcaggagttcgagaccagcctgggtaacttggcaaaaccctgtctctacaaaaaa

SEQ ID NO: 2221 - DNA, 712 bp, Homo sapiens
tggcttgtgcctgtaatcccagctactcaggaggctgtggcagaaggatattttgaggccagaagttcaagaccagcctgtacaacattgcaagacccaatctctaacaaaattttaaaacttgtccgggcatggtggtagctcaggagttcaaggctacagtgaactatgattgtgccactgcaccccagcttgggtgacagacagtgagaccctgtctctaagaaataaataaaaataaaaaataagaggagcttttggaattcagctattaggaagttactggtgcccatggagggaagtgttccaggcaagtggtggtgttaaaggtagagagaagagacattagctcagtgcttcccaaataggatagccaaggcgccaagctgcagactgatctcaggtgtggcccagtgcctccccctcagctggaaccccagaccagactcctgcagtttcaagcagcctcctccttctatcccggtgtaccttccatatctcagtaccaccacggggaacctcaaagactcgacaacccatttcaaaagcctggctatggaaagaagaggaaagggaggagccgcaagtttgggagaaagtgtatttgggatgctggagtgggagcctgtttgtaggagccatagggcaggcttgaagatgaatgggaaagaagatgagaggaagaggaggtgagactgagagcttcaaaagc

SEQ ID NO: 2222 - DNA, 12435 bp, Homo sapiens
  SITE (12263): n equals a,t,g, or c
aagaaaagcaggtcagcattatgacctcaaaatttctaaggcaggaaatgtaagtatatatattttaaatgaagcttattatgcccaaaagcctgtcttatttagcattttcagtatatttatattgtttttaatttttcagtatattgtttttaatttttcagtgtgtagatatgtggaaacggagtccctgtaatttggccataccttctgaagtagatgtaagtcagttcatgaattactttttttcatataaagtttctcagttttactattcggttgcttataccttgagaaaacaaaaaaaaaacttactttaaaaacaaagtgatttagatcatactctaaacaagttttttaaaaacaatatgatttatttcaaaaaacatcgaaaaatgatttttagaagctgtgtattgttcttttttcacattaagttgaaagaacataaccccttaatatagttttttggagcaggaatagtaaaacaattttaaaattggaaaaatacagtgtatattacataatcacgtgaaatctctctttttttgataatatttcatcaaaatttcctaatagtgcttgtttactcaaactggttaaatttgaagattaataatattatttgacataaaataaaataaagattaataatactagagaagtaaccaagattaggaacattgggttgtattctttattgatccataatatacatgaactataaatggttgaagacaaaaaagggatattttgatgagtgatcctatgtttttctttctcctctgttgttttttatattcactcaactctttattttcagatttgttcttctgttgcaccctttccatgctagcacatgcattattcttactatttctgatttaaaaaaaagaaattacgcaaagcacaaagccagaagcagcagtagactgtatatacagctcaaggaagtaagccatattatcttttggtagcttatgtgcagttcttcaaggaacatggcctgataatagaatttcagtgtaaatactgaagggtggaatttagctttggaggacaagctggagtacttccccaacttttaatgtccttacgaatcagctggagagcttgtaaaattgtaggttgctactcagcaagtctgaggtgctaagatgcatttctcacaagctcctaggttatgtgatgctggggtccatggaccacacattgagtagcagttgccctcaaagcttctcagtctagctcaatcagaagaatcacctaggatatcagttaaacatagagatttcaagccctactcaaaatctacttacttaggatttctaagggacagacatgaaaatctgtatttttaataggtgctccaggtaagtctaaattactcttaagatcgtggttgcctgtaagataataacatttgactcacacagatgcctaggacatgtacagaatatatggtcaagtctgactagaaagtggaaaacgttcaaaaaatttgatcagctttaatattttaccttccctagtctccctcagttttgtccccactgttacatgaccgcttttatttcaagaaaagcctgccaaaaggaaaagatctttatccttatctctctgacattccaattttcctgaaggaaaagctctaaaggaaaaacatatcagcttatggacaaaaaaatgaagaggcactgtctagaaaagcagctgtgtttattaacacttatttatttggtttggttttattaaagttgttttatacacatcagaagacttttaaactgcttaagcataagtagttgataccggtaatttaagaattcttgcgctaacaagtatattgtattgtcgagttacttagtttcttctctttgatcagaatactgattccattttatctgatatggattctattttatgtggtatttcttgatttgattgtttaggtggagaaatatgctaaagtggaaaagtctatcaaatctgatgactcacagccaacagtctggccagcccatgtaagaaatcattgcctgtctctgtttctaattatgccatttctaatctggcctctgaatttattaaacataaagtgcaattgccattagtttgggaccttttttcttttttaaattagtttctgcgagttcagtttattacaagaagaaacaactattttgtttatcagagtatgctttgcattttaaacagcaattttttatttttattttttatttttattttattttaattttttgagatggagtttggctcttatcgcccaggctggaggtgggatcttggctcactgcaacctcttccacttcccaggtccaagcaattctcctgcctcagcctcctgagtagctaggattacaggcacctgccaccacacctggctaatttttgtatttttagtagagacagggtttcgccatgttggccaggctggtctcgaactcccgatctcaggtgatccgcccaccttggcctcccaaagtactgggattacaggcatgagccactgcgcccagccttaaagagcaattttaatgaagaacttcatttttacttttggtttgcgtattggtagttctgatttgttttgtttctaattaataaattcttctaaggctggcttttaacagaagtgttctttataagttttcctaattgcaataataacgtcttaaaaagagaggaataggtgtaatatttaaattaggtgaactctgggagtgaaatgatgacagatgttttttgtgtgtgatagcaaaagcagacaaatgataaatagatctgcttttgaaagttttatccttttaatattatttaatatttgcaattcatatatctagtatgaaattctgccatattaagcttgattaaacatgccatttaaactctcattcccagagtaccatgtaaaaaagaatcctgtactgccctcctgagcataaacaggcacggcagcatgaggatcaggggtgcaagcttagggacagactgctaactccctgtgtgaccctaggcaattcatttaacctctctttgcttaattccctgacttctaatacggaggtaataacagtgccaaccatgaaaatatggtggagctttcagtccctgtagagtgctgagaacagtgtttgattaatgttcattgttattatatgtatatcaatatgtctaataatgtatttaatgatgtattaatattgttacatatgtgttcatacttcatagtatatgttaatgctttactaaatgcatgctgagtgcccatatagtttttaggaaaagaaccgtgctgtgctttattctcataggcagacttaaatatctttgtagcctaagtgctgtgtgtcttcctatcgtcagatacatgttactgtatcatttattcctgatttttactaattcttattgcctgcctacttgtgaaggtatttatttgaggtgctatgcatttttcaggatgtaaaagatgattatgtatttgaatgtgaagctggtactcagtatcagaaaacaaagctgaccatcttgcagtcgcttggagatccactttactatggtaaaatacagccatgtaaagcagatgaagaaagtgacagccagatgtctccatcacagtgagttctgttaaatacaagtaactggaaaaaaaaaaataaggcaccaagaatttatctagtaactactgatgaaccattaatgaataaaaatttctctttgggaactcacttattagttaaatataacaattagatttggcggtagacctaagtaaacttaagtcgtagttaccatgttgctcaagagttattaaaaataaaaaaacctatggtataattatttttatgcttgttttgaaggctattcctgtgatatccttctttatatgtttatggcacttaggactttaacctttgaacatgaagtgtttgggcaatagtgtgtttaaataggaagcaagtttactataaatgtgaaaagatgcttggtattttggcactgcatgtaaggacacagactcaatgcttattgtagttattggccctacatattaatacataaaaatatagatgatcttccaaaatgtatgaactacatatatttggtactgtcagtatttagttttattttgttttactatttatttggtttttttaatcaaattgatttgaaaaataagttttctgttttgaaaacaaaaaagaagctcagcagaaaaggatgggggcgaggtctatgttaattgtaaagcctttacttacacaaaatactaattgaaactacagtagaaaggtggattttaaagagcaaccccaccaatatttaggtaaaagtcaatgaaaggaaataacagggaatcctcagcttgttttttcacatgaccagtttttattattgtaaaaggatcagatattttgataacatacattttcttcttttttttttaagttatagacatcacaacagtttatttctgaatcctcagcatgcatttctaaggaagccattttttttctttatttttattttagatataggggtatgtgtgcaggtttgttacaggggtatatttatgatgctaaggtgtgggtgtctgctgatcccatcacccaggtagtgaatatagtacccaatattgattacttatatttaaaaaaatcttttcacttaaagacaacatacattggccatttttaatttattaacttatttttgtagaacacaagggtgatacatgttcttttgtgaaaaaattggtctatagagccaaatgactaatttgtttgacaggaagagaattgaattttttacctttgcatcagagtagctgcatgatttattatcttccagtcattcttccatattcataaaatactttatttaataaactatgaagttaaagtttgagctgcattaactaagcttttttttacattttatatttcagctcgtccacagatgatcattcaaattggtaattaaaaaataaactattttaatctgttaagaaattacataaatatcaaactctttaaaaagacttgctaaatatactttatttgaatcagtgataaatatgtatactttgtttgaaatatattctaaggatctgttatgtagacattaatagtaacttctaaaattgcaggttaaagtgagaggaaggccaaagacctttgcacatgttagttcagtgattttgctttaggatcaatagttgtaagggtatatagcacttggtaactttcagcccagattatgttttaataaataaattttgtgccaaaagaaatatcacttaattaaatcaaccaaattattcacattgtttcataatgcatgcaaaacttagtcattgtttcatatgtttaaatgcattaaaaaaatttttttcatatcttggtagatttaataccagtttatattactgtgactaaaacatggaagattcaaaagtaatcccaagccttcttaagacaactcttacctaatacttttctctccttttttttccttaaacattttaggttcattattggatcaaagaccgatgctgagaggtaaaaatatttgcatctcttattttggtcaggatggatatgaaaaatttttcacccttataggatagagaatactaggagttaaaaactttgattttggttatgctgttaaccatatttacactgtttaatatttatgggtctctgttgtaaaattagggcattggacaataaaacctctaaggtcctttccaactttaaaatcttactgattctagaaaaatatctgtaagcttgtgatacaccaaactactaagaatggttcttttcatgggatgagatttttgggggacttaaatgcatttttccaaagtttataatacctaggttttttttcatagaattaagaaaacaaaagaaatgtttaaaatatagttttgttttaaataagaaaacttagacatatctactgtagctaaggaagatgatttctagatagtactttaatcagaatctaagaaaggaattgagtattttctttggctgcttattacttaagtaatccctgtaatttctgtattagaaataagatattgaaagtatatctttagattgttatttagcacaatgttttggacaatttgtcattgaacagtttaaaaatatgtacttttaatacaaagataaattgcctaatttttaatatttatgttaattttgatagaactttctttttgccattaatagtcattattctttcctataaaataaatttgtgtttaaaacaggttttctaatctttacctgttttctcctgatattttagggtagtcaatcagtaccaagaattagtccagaatgaagccaaatgtccggtcaagatgtcacacagctccagtggctcagccagtctgagtcaggtttctccagggaaagaaacagatgtgtgtttcattaatgttacttctttgtgcccagttgtttcacaagtaatctgagaaatgttaagaatcatttttggaggctaggcacagtggctcatgcctgtaatcccaacactttgggaggccaaggtgggtggatcacctgaggtcgggagttcgagaccagcctgaccaatagtgtgaaaccccatctctactaaaaacacaaaaattagctgggcatggtggcacacacctgtaatcccagccactcgggaggctgagacaggagaatctcttgaaccccggaggtggaggtttcagtgagccgagatagcgccactgcactccagcctgggcaacagagcaagactccatctcaaaaaaaaaaaagaatcattttttgaggagcgggggtacagtttagttttgtttctacttttacctttttttaaaattatttaactctttataacatgatttttaaatgtacacaaagataaaaggaaaattacagtgaacacctgtgttctagtcatttggcttcaacagctgttattttcctttaatagataagtatggaagagtggaagcttgctttcatcttactcctctgcctttctccctaaaactctctcttcccaccctattactcagaaatcttttcctcattctttatgtgtactgtaatatatttcatgaatctcatgtgaaattttctctgtaatacatatagtattcaatctgtaaccactaagagcactttgcagagttaaaaatctgggatttatagcagtattaattttatttaataaactatgaagttaaatataaatatcatctggggtttatagcagtattaattttaacaagtaagcttaatgtcattgtcttttagcaaactgaaaccgtgtcagttcagtcttcggtattggggaagggtgtaaaacatcgacccccaccaatcaaacttccctcaagctcaggaaatagttcctcaggtattacatttcttagttttttgcagtctagaataacaaatattatataatcataatctctttttaaaactttgccccattttgatttctacagttcacagaagtttgaattataaatttaggaaataacttttatgttcttctaggtaactattttacaccacaacagacaagcagctttctcaaatctccaactcctcctccttcttctaagccatcaagtattcctcggaaatcatctgtggatctcaatcaagttagcatgctttctccagctgccctatcacctgccagctcatcacaaagtgagtcataacttaaattcttcattaaatcttcataagcttttgcattagtgtttcttaagacagcttttttcaacctgtgaagtagtgatatctgaatgtactgtgtacccaaaatgtataagttgctagaagcttcaggcagagctcttgttgattgtatgtattatgtctctattgtaattgtacttgtttttctgtatctgtgtatacattctgcgtgtacctttcttataggcttacaacctacacatctccttaaaaaaataacctggtagttacatgtggcaataagatttcaaaatattttttattccagtgtaccctaggatcattttgcatatttatgtaaattgtgtggctgatatgaaaaaaatgtcataagagttgttgctgcaggtcctatctttgtgtatatgtaagaagtcaactagttccaaggtggtgatacaataaactgaaaaacaatatttcaaaaacactcctacactcttttataaattgttgtcagttactaaaatgtgatgataatcataaagcattattctgaagatactgaaatgtaatttttactactgaatacttttttttaacatcaagaagagttatacaagaatgctagcattagtttgggagaatttcttcaaattagtaaatatctgaaagtaccaatttggggaaaaaagtcattccagttttttagattttttatagatagctaatatatgctgaaagttttagtacactgcacagtgatagggtggtcttcgcattagatataaacatcttcatctcgatagctcaaaaggtgtaatttttctgccttcttgttttgcacaaagaaaaatatataaattttctgaaagtcttattcacacttcttatgttgtgggtatggattatggtaatctactgcacacagttgttactttaagtaagggttgagtgacagcttctggacattcacatttctttcctttctttctgcaggacatgaaagctaaaaaagaaaacacctcaagagcttttggttttacttttttggtttttgttttttgtttttgttttttaaaaaattgataaactgtgcatacttcattcacaacagattttctatacattctacatttaaacagaagtacacagttactgttaaagatgcagtattatctctcagatatttgctttattactgttttttgtaaatttgtttgtcaggataaacttgatgtgttaggaattaaacatgtatatttaggtgccaaatatgattgttaaccatatgtaacttattaaatatgtttacagtttatctcagacttttacactaaataagcaaatttttaaatgaagtcttgaattagtgaaatcgtaaataacaaattaatttgaattcgtttgaacttttaggccaaaggcagcatgtaggaaactaactttaaaatgggtattgtgggtagaatataactgtatatttttactggtactgcaatagcatctttaatgggatttttaggtgatatactgcatccttaattgtaattgagtgtagcaacactcatgtatcatgtgtagaaattaacacttgcagttaactgctaaaaaaaaaaaaactagaacaaattgtcagtgctaagtaagattccattaaccttattttaaaaggactggccatttataacaaactagcaatttttatttttctcaatgagcaggatctggaactcctaagccatctactcctacaccaaccccttcatcgaccccacaccctcctgatgctcagagctcaactcctagtaccccttcagccacccctactccccaagattcaggcttcacccctcagcccactttgttaactcagtttgctcagcagcaaaggtctctgagccaggcaatgcctgtaacaaccattcctctttccaccatggtaacatctataactccaggaaccacggccacccaggtcatggcaaactctgctggacttaacttcatcaatgtagtgggctctgtttggtaagtttgcattgatgttcggattttttttttataaagatagtttcaccaatctaaataaattcttaatgtgtgaaattaagaacaaaccgcatattactcagactgaaaaggaatagtttagatatggacagaagctgcctgaccatgtatgttttaattttaaataatacatctgttaactgcactaagatgatatctcatcttatcgtttttgttttttgatacttcatcttgacagcagcttagaatttcctatttatcttctgcattactttctttgatatttaagacagataaataactagttgtgtttgcttagcagttttgttttttaatctgaggaattgtgtggctgattttttccttttacagtgaagtttaatgctttgtcttattctcctgcagtggggcccaggctttgatgagtggttcaaaccccatgctgggctgtaacactggtgccataactcctgcaggaataaacctgagcggccttctaccctcaggaggtctgctaccaaatgcactgcccagtgcaatgcaggcagcttctcaagcaggtcagaatgttggaaataataacctctaaaaaaaattaaagtatatgctaaagtaaaaatgtaattttaagagtaatgctaaaggcatttaatgtcattatttcatgaagtgttgtatcacatatatttcacttaaaaagcctttaaaagttctggcatttgaattaaaagtcttctagcagtcaacttctgtggaaaacttggtaagcctgtgagtctgtgcaaatctttcttctgctttccaaataacaaaattaattttggtagccttattgtcattgtagttatattccagggaaaataagtgtattttgaaaatatacattgtgtacaagaggcaactgcatcgcagttaagagcctggattctggagccagactacctcagcttgaatcccagttgtacagcttaccatttgtgtcatcttgagaaagttacctttgtgtttaattttcctcataaataaaatgggaatagcaataaaaacttacctcatagtcgtgaggattaaatgaaatataatacaaattatgtgtttaaactgtgcctgagacatgataagcatcttttatttaggagtagttattacctatacaggaaaacagttataataactggtgcttattttttgatgctctttaaaataatgtattataatatcttgaaacgattcagtttcactgaaagaaaatgtaataggaaaaacaatctagaaaaatttattaaaactttcttagttatgagaaagagaacctagagaatataattaaacatgctaacatgttgctgtaatttcctaattctagctagtgttcttattttaataagcataagtgtgccttagtgcgagaagtcctggaaatggacttcacatcttgaacttaggatatttacatgtaactactagttgtaccagttacatgtggcttcagttgctaaactggggttctacagaagtcactaaatttttcccccttatcctcagttcagtttgctctaaagtgggaataaaaatatctccagttggtacttaagagaactaaatgaagtatgaaagtgcctttggtaagctagaaagcattatacagatgtcatccacttttaaaagggggttaagccattttcttaaatgagaatttttccagaaagggatatttttgccaaatttcagtttcttatacaaggcttcgctagtgttacatgtgcatttcttcccttaaatctttaaaaaaaaaaaatgatatgatagagaactagatacatttttaaatagtgttcaaattagtatattttgttagcaaaatatatacataccttgagaccaggatcaacaaactacagcacacagcctaagctagaaatggttactacatttttataggattatgaaaagaaaatgcagcagaggccatttgtgctcacaaagcccacatgatggccctttattgaaaacgtttgtcacccccagctttaagatatgctctgtgttaatgtaacagattttttaggaataagtttaaattaacagagcactgtttcctgactctgttttgatctttatacacaaattgcaacattctttagcattctgattaacatttttagttaaaaaaaaatagcataaagcacaccggttcttagagatatgattattatagtatactatgtagcattgagaaatgtaaatagatgccaatacctggaatgtatttgcacagcagtgatagttttgttatattcatggtgttcacataattcttgattactctttgttcagccaacagtcagaagaatgaaaaagaagtcccagtttctgaaatatagaatataatgtgcatctggtgcttcacaactttgaataaaatctcagtattgattaatattgaagacattcttttgtttttaagatatttctagaagtatngaaaattaagcacatgtatgcagagaatacataaaaattattgtacttatatatactaaagtataaattattttcatgtgtaataaactttcatttctgttataaccatgagttttatttaacaggtgtccatttggtttaaaaatacttcagtctcaggcccttaatgtac

SEQ ID NO: 2223 - DNA, 7612 bp, Homo sapiens
tcaccactcctattcaacatagtgttagaagttctggccagggcaatcaggcaggagaaggaaataaagggcattcaattaggaaaagaggaagtcaaattgtccctgtttgcagatgacatgattgtatatctagaaaaccccactgtctcagcccaaaatctccttaagctgataagcaacttcagcaaagtctcaagatacaaaatcaatgtgcaaacatcacaagcattcttatatacaccaataacagacaaacagagagccaaatcatgagtgaactcccattcacaattgcttcaaagagaataaaatacctaggaatccaacttacaagggatgtgaaggacctcttcaaggagaactacaaaccactgctcaatgaaataaaagaggacacaaagaaatggaagaacattccatgctcatgggtaggaagaatcaacattgtgaaaatggccatattgcccaaggtaatttatagattcaatgccatccccatcaagctaccaatgactttcttcacaaaattggaaaaaactactttaaagttcatatggaaccaaaaaagagcccacattgccaagtcaatcctaagccaaaagaacaaagccagaggcatcacgctacatgacttcaaactatcctacaaggctacagtaaccaaaacagcatggtactggtaccaaaacggagatagatatagaccaatggaacagaacagagccctcagaaataatcccgcatatctacaactatctgatctttgacaaacctgacaaaaacaagcaatggggaaaggattccctatttaataaatggtgctgggaaaactggctagccatatgtagaaagctgaaactggatcccttccttacaccttatacaaaaattaattcaagatggattaaagacttacatgtcagacctaaaaccataaaacccctagaagaaaacctaggcaataccattcaggacataggcatgggcaaggacttcatgtctaaaacaccaaaagcaatggcaacaaaagccaaaattgacaaatgggatctaattaaactaaagagcttctgcacagcaaaagaaaccaccatcaaagtgaacaggcaacctacagaatgggagaaaatttttgccacctaccatctgacaaagggctaatatccagaatctacaacgaactcaaacaaatttacaagaaaaaaacaaacaaccccatcaaaaagtgggcgaaggatatgaacagacacttgtcaaaagaagacatttatgcagccaaaaaacacatgaaaaaatgctcatcatcactggccatcagagaaatgcaaatcaaaaccacaatgagataccatctcacaccagttagaacggcaatcattaaaaagtcaggaaacaacccaggtgctggagaggatgtggagaaataggaacacttttacactgttggtgggactgtaaactagttcaaccattgtggaagtcggtgtggcgattcctcagggatctagaactagaaataccatttgacccagccatcccattactgagtatatacccaaaggattataaatcatgctgctataaagacacatgcacatgtatgtttattgcagcactattcacaatagcaaagacttggaaccaacccaaatgtccaacaatgatagactagattaagaaaatgtggcatacactgcaaaaacatgccaaaatgtaaaggccatcaaggctaggaagaaactgcatcaactaacgagcaaaataaccagctaacatcataatgacaggaccaaattcacacatgacaatattaactttaaatgtaaatgggctaaatgctccaattaaaaggcacagactggcaaattggataaagagtcaagacccatcagtgtgctgtattcaggaaacccatctcacatgcagaaacacacataggctcaaaataaagggatggaggaagatctaccaagcaaatggaaaacaaaaaaaggcaaggattgcaatcctagtctcgaataaaacagactttaaaacaacaaagatcaaaagagacaaagaaggccattacataatggtaaagggatcaattcaacaagaagaactaactatcctaaatatatatgcacccaatacaggagcacccagattcataaagcaagtccacaataataatgggagactttaacatcccactgtcaacattagacagatcaacgagacagaaagttaacaaggatatccaggaattgaactcagctctgcaccaagcagacctaatagacatctacagaactctccaccccaaatcaacagaatatacatttttttcagcaccacaccacacctattccaaaattgaccacatacttggaagtaaagcactcctcagcaaatgtaaaagaacagaaatcataacaaactgtctctcagaccacagtgcaatcaaactagaactcaggattaagaaactcactcaaaactgctcaactacatggaaactgaacaacctgctcctgaatgactactgggtacataacgaaatgaaggcagaaataaagatgttctttgtaaccaacgagaacaaagacacaacataccagaatctctgggacacattaaaagcagtgtgtagagggaaatttatagcactaaatgcccacaagagaaagcaggaaagatccaaaattgacaccctaacatcacaatccaaagaactagaaaagcaagagcaaacacattcaaaagctagcagaaggcaagaaataactaagatcagagcagaactgaaggaaatagagacacaaaaaacccttcaaaaattaatgaatccaggagctggttttttgaaaagatcaacaaaattgatagactgctagcaagactaataaagaagaaaagagagaagaatcaaatagacgcaataaaaaatgataaaggggatatcaccaccgatcccacagaaatacaaactaccatcagagaatactacaaacacctctacacaaataaactagaaaatctagaagaaatggataaattcctcgacacatacaccctcccaagactaaaccaggaagaagttgaatctctgaatagaccaataacaggctcggaaattgtggcaataatcaatagcttaccaacaaaaaaaagcccaggaccagacggattcacagccgaattccaccagaggtacaaggaggagctggtaccgttccttctgaaacgattccaatcaatagaaaaagagggaatcctccctaactcatgttatgaggccagcatcatcctgataccaaagcctggcagagacacaaccaaaaaagagaattttagaccaatatccttcatgaacattgatgcaaaaatcctcaataaaatactggcaaaccgaatccagcagcacatcaaaaagcttatccaccatgatcaagtgggcttcatccctgggatgcaaggctggttcaacatacacaaatcaataaatgtaatccagcatataaacagaaccaaagacaaaaatcacatgattatctcaatagatgcagaaaaggtctttgacaaaattcaacaacgcttcatgttaaaaactctcaatacattaggtattgatgggacatatctcaaaataataagagctatctatgacaaacccacagccaataccatactgaatgggcaaaaactggaagcattctctttgaaaactggcacaagacaggaatgccctctctcaccacttctattcaacatagtgttggagttctggccagggcaattaggcaggagaaggaaataaagggtattcaattaggaaaagaggaagtcaaattgtccctgtttgcagatgacatgattgtatatctagaaaaccccactgtctcagcccaaaatctccttaagctgataagcaacttcagcatagtctcaggatacaaaatcaatgtataaaaatcacaagcattcttatacaccaataacagacaaacagagagccaaatcatgagtgaactcccattcacaattgcttcaaagagaataaaatacctaggaatccaacttacaagggatgtgaaggaccacttcaaggagaactacaaaccactgctcaatgaaataaaagaggacacaaagaaatggaagaacattccatgctcatgggtaggaagaatcaatatcatgaaaatggccatattgcccaaggtaatttatagattcaatgccatccccatcaagctaccaatgactttcttcacaaaattggaaaaaactactttaaagttcatatggaaccaaaaaagagcccacattgccaagtcaatcctaagccaaaagaacaaagccagaggcatcacgctacctgacttcaaactatcctacaaggctacagtaaccaaaacagcatggtactggtaccaaaacggagatagatatagaccaatggaacagaacagagcgctcggaaataatcccacatatctacaactatctgatctttgacaaacctgacaaaaacaagcaatggggaaaggattccctatttaataaatggtgctgggaaaactggctagccatatgtagaaagctgaaactagatcccttccttacaccttatacaaaaatcaattcaagatggattaaagacttacatgtcagacctaaaaccataaaaaccctagaagaaaacctaggcaataccattcaggacataggcatgggcaaggacttcatgtctaaaacaccaaaagcaatggcaacaaaagccaaaattgacaaatgggatctaattaaactaaagagcttctgcacagcaaaagaaaccaccatcaaagtgaacaggcaacctacagaatgggagaaaatttttgcaacctactcatctgacaaagggctaatatccagaatctacaatgaactcaaacaaatttacaagaaaaaaacaaacaaccccatcaaaaagtgggcgaaggatatgaacagacacttgtcaaaagaagacatttatgcagccaaaaaacacatgaaaaaatgctcatcatcactggccatcagagaaatgcaaataaaaaccacagtgagataccatctcacaccagttagaatggtgatcattaaaaagtcaggaaacaacccaagtgctggagaggatgtggggaaatagcaacacttttacactgttggtgggactgtaaactagttcaaccattgtggaagttggtgtggcgattcctcagggatctagaactagaaataccattggacccagccaccccattactgggcatgtacccaaaggattataaatcatgctgctataaagacacatgcacacgtatgtttattgcggcactattcacaatagcaaagacttggaacaaacccaagtgtccaacaacgatagactggattaagaaaatgtggcacatatacaccatggaatactatgcagccctaaaaaatgatgagttcatgtcctttgtagggacatggatgaagctagaaagcatcattctcagcaaactatcgcaaggacaaaaaaccaaacaccgcatgttctcactcataggtgggaattgaacaatgagaacacatggacacaggaaggggaacatcacactccgggaactgttgtagagttgggggaggggggagggatagcattaggagacatacctaatgctaaatgacgagttaatgggtgcagcacaccaacatggcaaatgtatacatatgtaacaaacctgcacgttgtgcacatgtatcctaaaacttaaggtataataataatttaaaaaaaaagaaaaaaaaaagatccaaagaaagggtggtagacaaaggtctagctcctaggctgagggcctcagggcagaatgcggcttcatcctgagtcaatgatcttctcaggtagttgcttcatatatacccccttcccaacaccagagctgctcttagactgaggtcaagtgtgagccagagatggctggagatatgagaacaagagcaaagcggacaggaaagggctaggagggatcgcaccaacacactccagcctgggcgacagagcaagcctctgtctcaaaaaataaaaaataaataaataaatgatagtggatttctagtttgaatcgaaagttcaggaaaccaatcttcactatcaaaacggaatatttagggtgaagaaaatttatggtacttcctcaaatgacccataatgggcaaacgttgggaatgagagaggcgaggccctgaaactacttccaaggggaacagtttagagtggagagaaatgttacagcagcttctttcagaaaatgatctaagttggcctggagatcacacactccattgattggaaggtcatggtcttgatgaaagtgctgggtatgtttttactcttgtgccaaataggctgtcctttagaacttcaatacaggcattaaaggagtaattaaaatccatcccattactctcctgccccgacctctttttaaaaagaattcatcaaattttatactttcaagaagaaatttttcaaactgaggactatattttgcaagtctgtactattacattcctatggtgggatataagtaacacaatagatatttacatatagatattaaagctgaaggagcgcaagtaaaatttgttatgtgagacgtaacttacagcccagaacagctcagaagttttaatgccatccttaatggtgtcttaatgaaggctttctgcaagtagaaagttggctggataataggccattagaccatgaacagagattttaaatttatatttccttttcatcttctttccattaagccttgatggataaaaaattatgtagcaattgactgcagcctacatcagaccattttctgtggagaaaatcatgataatggtagttggaccctaaaactgtttgaaagttattttcatagaaagagatcttttttttcttcataaatcagttgtgttttatgaaaacataaatggttcccctgttttggaatgctgctgcaaattctttttgcatctgacgtataacttttaagcttcaaagaaatactataaactagatgaaataaaatataattggatatagcggatttgtttagtatctttttagtagggcaagaactttctgattagatagatggggatgatactccagaaagatttagtgcatattgtgatgaacattaattatgggctgaattctcctatatagaataactttaatgttagtgctttaaaactattaaatggactttcataattatactccaataagttttgtatgtcaggaagtttttagtaccattaccaacctgaaatataggccatagaggctgatattgagcacactgatgttactctattttatctcctttctagtagaggaaaagctgacatatccatcatgctatcaaccagagagatttgctaatttcattttttgcattttcacttacccataataattaatatgcctaatgacaaaaggcattttaatcacttaaagtgccttatgattcatcaaaaatgtaatattctgtttgggataaatgttattgtatagtattataaaactttaactcatcagtaa

SEQ ID NO: 2224 - DNA, 13968 bp, Homo sapiens
ggaaagaattcaacttttatgcaataacttaaaccagtacagccaacatatttctctttttggccaaaccctgaccacagtgagtagagatgatctctccatttctggtatgcctggtaagaaggggcagaaacctttcttcgacaaccttattctgttccccttggcattgcagtgccacacgcagattcactgtgccatcagcaagattgacattgaaaaagatatccaggctgtaatggaagaaactgcaattttatctacagaaaacaaatctgagttcctgttaacggattactttgtgagtatgaaatggaaaaaaaaagttacattaatggagaatcttaggtactgagggacttacattgaaaaaattgaaagcaaatatcatgttttatcaatgaaaatgatttctcataccccatataaatttaaaaaacccagcattctagtttacaaactgtacaatggaaacatgtctttggtattttctagaagtaaagaaagtcaagcagggttttaaacagaatcttcatattcggtcttctataaaagtagtgccaggcagacatgtttcaatgacctataattaatcactgtatatcacgtggtgcttaaattggttgtctgcacaaattgctgtgcaacaaattaccgctccccacccccaccaaaataatggcttaaaacaaacatgtattatctcatagtttatgtgggtcaggaattcagttgtgtcttagccaggtgtctctgaacccctcccaaggctgcaatcaaggtatcaggttgggctgcagacatctccaggctcttcctccagaagactcacttccaagctgactcacagggctgttggcaggcctccagtcctcgctgctgttggttggagatatcattttcttgccatgtgggtctctccatgtctcagcctactccccgcaaaatgagtgatcaagacagacagagccagagtgcccaagaaattataatctcttgtaagctaatctcagaagtgacatctcatcatattctatttgctagaagcaagtcagtaagtgcagcccatactcaaaggtgggtgtgagggaagatcacccaaaggcatgggttctaggaagtgggagtcactatcagtatttttcatggtcccttctcttgaaaaccttggaccagattatcggaggcttattttgagggtacttgagtgattctactgtgggtgtttttgctgaaaactggtcagtgtccctggtgagagcccaagcacgttgcccctttgctatattggggcaaattatttgtccttctgggtcaagcctcaaagattttggcctctgctcccctcttgatattcttaattgtagtgttctaggaactgattattaattaccaaaacctgcagaaagaattctgatagcgtttccctgggtcctctgccatattttattcaggatttcaagctccagattaggggtgtcactcttctctgatatggagaacaagcccactggtcatgtcctccataggattagaagtacagccaaagctgacctccctggacctctgatcaggcaacaagagggtagaaggcagaggtggttagatcaggcactgcagtaaaccctgattggctttccctttccccacctttcagacagcagcaaatgaccagctattttttactgagtcttttttttcccaccttggcaaaggagaagtatattagcaatatcaatgtctgttcaatgcagaaacaaggtagaaatggaagtggaaatgatttgattacatggggaaagcgctttttttctttcaaataatgtaggcagggcctgagatggaaaaatgtacaataaaataaatctattttcttacaaagaataataaaaatgcccctatcaaataacttgtcaataaaatgaggattattcttgaaaatttgactagggttctaccaaagtgtaaggaggcagccatgatgacttctcatttattggcatgttcagggaaatttttggtttctataaaacttcactgtgtcagaactcacaaccatgaatctgttgtctaagagaaaggactgtgtctcaaaatgagtgaatagtattttcttgacatctttaaggcaaagcaccccaatatctgactttatagtcattgtcaataagtgtaggctggtttttatccagtgttatgaaatttacatggaccagggacaacaaagagaccaatctgagtgcaaaacttggagggcttggtgacctggtgaaaatatttgtaaggttaccataaatgccatgttcaaaagattgttatctgtaattttatacgcctcctccagtactgaccttctttctaacaaatctttagaagagaaggacaaatgttaagagttaaatgatggcaatataccccatcctgaaattgacccaggagcaatctatccctggaaatacatgtttaaacaatagatgtccccagacaaaccaagggaagccttggactggtatgggagctatgttatgacttgcattccttcaacagggaaggactaatggttttagttaggtgtcttagcagtttagtcagagtttacttgggggtgtgatgtcagcttgcgcctcagctgtgggatgacatgtgaaggagtggtagagcatttggggtcaacttgggccttcttttatctgtgtcacaggtaaaatgaggaaaataaaaccaaccattgagttgtaggagttgcatgtaataaataatataaagaaatatttatttatttgagacggagtctcgctctgtggcccaggctggagtgtagtggcacaatgtcagctcactgcaacctctgcctcccgggtccaagtgattctcctgccccagcctcccaagtagctgtgattacaggtgcacaccaccacgcccggctaattttttgtatttttagtagacagagggtttcaccatgttggccaggctggtctcgaactcctgacctcaagtgatccacccaccttggcctcccaaagtgctgggattacaggtgggaaccaccacacctggcccagaatataaagacacttttgtaatgtgcaatgaaaaatatgtaaataaaatatttttatctgtatatgtttttatagaggctattccctttgctctaaatcctcacacttcttgtttgtgaagctccatctaaaggtaatctctcagccgggatcctaatttttctccttccttatcagcgaagcctgcatcctcccctcccaccttgagtcattagtttcccgtctttctccatgggtttctgtccctctgccactcatgtttagcaacctcctcactccaactctaccatcctattcttttttattcaatccttgaaataatgcatgtgaaagctcagatatcatgaatgattcctcatagcctatgtgataaaattcctacatcagccctaaaatctagcctcaactccctgaacaattttttcttcccctatttttttgctcatgcaacaggtgtctttattgttcctgacacatttcccacagtcctcccccagccctttgctcccgccatttttcctgcctggagtgccctttgccatctttccttgactagacagttacgtcttcttgcctcctcgaagctgtcagctgcctgcactcgtggtgtctgtagcattcgcgaatgcatgtggtcttgtattgctagtttctttaatgttatgcttcaaggcctaactaaatcataaacccattctggaaagagcatatgtgttttagctcacatcttcccagtactgagccaacacagaactcagtcaaaatgtcttccactcctgaggcagtcatagcctgaaacacatacatgatattacatttgggccattaaaggactctaacttgaacaaaagtaaataaggaagcagtaagtatacaacaaatagatttatcaagaaaatgaaatagctatagcaagggtccatcctcaaagaacaatctgctctattaaaaagtgctcggccatgtgacttaaaagttgtgaacaagacaatattttcttattcatcaggtctcgaacaggtagaacaatgtgtgtaaaactaaagattatcctgcttaaaaaattgttttattttataaagttaaaattaaatgcagccagtggaagtatcagaatggacagggaatagcaactcttacttcttcccccttgttagacatccttcttttttcctaaaggaagaagatcctaacagtgcaatggataaagagagacgaaagtctttactaaaaccaaaattattgagactgcagagagacattgaaaaagcctcaaaagacaaggaaggtgtgtaaccatctctttgaatggccagaaaagggaccatatgatgctcagaggtttcattcagagttaggattgatctgcttttgctatttggcaggggtcttctcatttaaagaaccatatatcaaacttcagttgtgtgaacaaaaaaaaaaaaaagtagaagaaaaaagaaagccaaaaaaaaaaaaaaaaaggaaaatcacattttggtctatttatgaaacctatataagtattatactactattttcagaaatgtagcattttaactgtgtttctgaaattggctagaatgagagataatgtgtttggtttaaaacatggtcaaccaactgtgcatgagagttttggatgagttttttggtttgtttcttttgacttttgaaacaatgtaaaaacctttcaaattaaattctgtacgtagaagttaggcatgtcagactgtgaagcagctctaaagcaacaaggatgacaaaaacgactccacatttgtgactctgatgtctacctagtaacttgttttatatggaccacgataactcattgcaatggaatactagagagcaaattcaagatagaaaacatttagtgatgtgaataccataacgaggaagaagccaacgttgggtaactgttagcaattgctagaatgggtcgactgaaagaatttcaaaatctcatctggaaaaataacaatcaagatgctttaagcaccagcacttctcaaatttcattaagtgaagagaaaggtaaacagttcatttatcattcagtcaaatttattaagaactacctgcagagactccctcagccatttaagaaaccctactggtggctgggtgctgtggctcacgcctataatcctaacactttgggaagccaaggcgggtggatcacaaggtcaggcgctggagaccagtttggccaacatgatgaaactgtgtctctactaaaaatacgaaaattagccggacatggtggcatacacctgtaatcccagctactcaagaggctgagggaggagaattgtttgaacttgggaggcagaggttgcagtgagccgagatcgcgccactgcactccagcctgggtgacagagcaagactccgtcttaaaaaaaaaaaatctcactggtatcacttctaggctccctttgagagcgaccgactcctggctgtgtcccactgagacagtgtgaaaggtgactgagaacatgatttcattttcaggcctggaacgaatgcttaaaacgtactccagcacctcctccttctctgatgcaaagagccagaaagacacagcagcgttaatggatgaggtaaatgtttgccgagtgcatttcctagatgtagtgatgaaaagggttatttttagaatacttgtttctggtccacttggccttgtttgcctttcctttctcatgacatagaacaatctagtgggggagcttatagggtcagcttcataagtcatttgagggatctggaaaaatacaactacctagaaatgtttgctttggtgtcctaggaaaagaattgtgtctaaaatagtattctccaaacagagtcgttctttaagggcctagaaaccatgtgcactttaacccagttaagaaaagcgacaggaaacaaaggatctgcattcagaaaggcctgtatttagatttagctctgctgtttacagggacctgggtcaactttagttttctcatccgcaaaatggggatattggtactttacctcatggggcttttgtgagggtgaaatattatttagtaaataccagcacaatgctcacaggaggagctcaaaaactagtaatttttattaaggtggtattttccattcatccctctgctgatctcagggttatcggagaataacaggggaaaggaaagacgtggttgcagagggaatagggcagtctggtgtgtgaggcaaaatctggggaaaccaggagcaactttgagggcaaagttctttaagggtgggaattggggtggggagatggtagaagaggcagggaggtgggcctcctggcctttgtgctgagtgtgtgaactctagccccatagacattcgtggggattgatggacattttggccacttcagaggaagggaaagggatagttaacaaaaagctgatgaattttacacaggaataaaaatgaacagatatatagcaccagtgtgcaacatatgggtttctgctgtgattagagatcatgagtggactggggttaatctgagaatcatttaaggagataaattttttagcaatgttttgaaggtacaggaatctgggcgttttgtttttcttgcttatagcctaactttcttgtgaaggtaggtacttgataattgtacccagattggcaacttcaatagttctttggtgaaagaagacagatgcagtgaggtatcgctgacctagtttttagataggctttcttgagtaaggtgctgttgcagaaacaagcctaacacttcttgtaaaagaaaatagcctgcattgtgtgcactgggtaacagaggtctaacatacctgcaatgacccgtggctacagtttttatgaaattataaaacagactgtaggacattttctgtgaccgcacaagctgtttagttaactactgatgccattgggttatacatctattcctttggctgtccttgcacagaattttgtcattgtcattaccagcatacatgtattaggatcatctgggtcctctcacctgaagcacacagtggaggacacaaggagggagagcatctgaccttggaacttccaatgtttatgatctggtgaaggagcaactatgaacctttaagtgaggaatgccaaatatccacatgatttcattacgcatgctctgcatctgggtagacagaaactagtgatactggtagattttgtgccacccacggaaggtttctaggatgaggaaacttttatttacattcttccttatttcattatatcttggtccttgaagtgccatgtttgaatcaagaatgttcacaagcagtgtcataagaaaaattgttgagaaaactggaggcacttagattaaatactgtctttagagaccagaaagagggccacatagaagaagaactagatgtgctctatgagactatcaagtgaaggtctaatggtagaaagcatgggggagcttttagttttgtcttaggtaagcctgccccacaatgcagtggattcctccaacgattagagactttctccatcaattggatgtcttctgtccatggctgtgacaccctggcagggatattagggttgggaattcccatgctggaggtgtgggggagagagggataatggtgaggagggggctggataagcaagacccttccaatgcttagattctgttatttaattcaccctggctggacccagcctgacaaggtaattataaagtttctagttcaaggtcatatcaagaacagacagagactaggagtgtatctttagcttgacttattatgtttatactcaaatgccctaaaatattgttcccagtttccagaagtattcctgtaaactttgtgggtaatataagacctcaccttatcaaagaacaaacaaacctcacattcaatttcatttgcgtctattgatgttaattcaattctgttcacaatatttagcactgatggctcaccttcttcgcagaccaccaaaaatctgccttctacaatcaacacttatcccctttcttgtccctcagcagaaaattgagtaaaacctcttcattgccataaaatactaatatattaccaaggtttcctgttcacccccagagtacagaatgagacacactcaacaactaaaacctccctctaaactgcttaaagagtttattcctccatttttttttccttcggcattttctgtgaatatctgtatgagttaaatgcgtacttttctaacctttgttattttgaaagttattctgatattcctatccagttgtgcctcatttactagaaatttgctcacatggccaaatgatgtatccacagaacaatttgaaactagaccttttggaagcgaactcctacaaactgtcatcaatgttagcagaacttgagcaaagacctcaacccagccatccttgtagtaattccatcttcaggtggagggaaaaggtaacatttaaggagactggttgtaatttcttgattgggcctgctgggtggagtggcttaaagtagcatcagggcaaaaaaggtgttaggaattctatgtgatattaatattcatgcagttagttaagaagataaatgtttttatttttcttttgagcacaataacaagagctagacaaaaccgaatacattctgtgtacaccaaacttctatgagaagctaaaaaacacttttgatttcttctttctcatcatacctgaatttcatcctttggatgtgcttttacagtaaaatttctattaaattgaaattttaatattcgttcagacctaaattataagattttgtggtatgtattagtctcatctgtttaagatggtgcctaatgcagataatgcatcagtacagctctgaaatgcttgtagctatttttattactgatcagaagggggaactgtaatcatcttgtgaagggacagttttctaaggctcaagagctcgaaaacaatctcaatcatttacagggttgtgatcatttcacttgcattaagccaactaaagttgtatttgtaaaagtaatgctatgaatattactatttgacctagacacataggttagaattggaaacacaggctataaagtatagtaattgtgtaattgtgaaaatattaaggcttcaactcaaaactgaaacacagtagggcttaaaaatctttgaattatttatacccctcagtttaaaaacttccagtccaggcgcagtggctcatgcctgtaatcccagaactttgggaggccaaggcaggcggatcacctgaggtcaggagttcgagagcagcctggctgacacggtgaaaccccgtctctactaagaatacaaaaattagccaggcatggtggtgggcacctgtaatcccagctacgggggaggctgaggcaggagaatcacttgaacccgggaggtggaggttgtagtgggccaagatcatgccactgcactccagcctgggtgacagggcaagactctgtctaaaaaaaaaaaaagaaaaaacaaacagaaaaaacaacttgaggaaaacagctacagaagagttaattttcatgaatgtttatgataatcgtgttacaaaatatgactttttatgtcatttgaacaggagcatactcatagctatgtgaaaatatctcggccttttttaatgaagagattagagaatattgtgagcaaggcatcttctggtgggcagagcaatccaggttcttcaactccaggtaatcccatgcccacaatcattttggcctgggtcctactggcagggcacattgctacatttaaattttagtttcagagccactttgacctgtatctgtttaaggaaatttatatttccatcgggaccgattaatttgttagactctgtagctttatgtaaaaatgggaaaaagttaagaagagtagagggttgggaaagtatcttatgagaagttgcctcagatatcagatgactggcatccaccttattcaaatggcctgttatttgccataaacataatcacacctaaaccatcgtgaggagctttgtcgctctgtctccatagcctcctccaaactcccataagaagcctgtcctctctgcgagacacatggtgatccaggtggtttgccagggcttggactcatggcctacaaactcctgttagcagccatctgacttcagtcattcatgcacccacacaccacactgctcttcatctttcagcacacacacacgtgtcactgtacctgcatgttcaagtataattaccataatcttgactatctagttttttaaattagaaattggtttaaaaaaaaaaaaaagaacttcagtaaaaccaggacattatggttcacacaatatattaaggagtcactgttgcattgtttgagaaacagttccatacacagctagggatgatgataacatgcacatgccccaaatatcccgtatttatacctgaatggcaaaactggtgaatgttttccaaaacatgcatgcaattactattattatacaatgatgtttttctctagacttgctatttcatgtattataatatagtttttggttatataacatatgcagtccatacatatagaaagtgcatcataagtggttattgaatcaaggaatgaacattatataaaattacaaactttccttttgagaaaaatttaatatattgaaactctgcatcacactgttaaataaccaaagagcttcagctcatattcatttgcctgctaacacagcatactaattacagctttatctatttcagcccctggtgcagcccagctcagcagcagactttgcaaggccttgtattcttttcaagccaggcaagatgatgagttgaatttggaaaagggtaagaatcattctcaaatattttaattgccttcccatattgagattcttagcatgaataaaaccctgtcttagtgtggcagccttaagagttactaccatgtcaaatcagttcacccttcttgaaagataagcacatctaaaacaaaagctcgcataatgataatagctaacgcttattctgtttactgtgtgtcagacattgttgcaggcctattgtccaatttaatattcatgaaacccttggagggttttattggtattcccatttcatagcagaggagactgatacacaggaaggttaggtgctttggctaatgtcacaggctgtggcaacacaagacttgaacttggaaacacagtcatgctcctaatcacagtgcacactagggtagaatgtcagtgatggaaagtgattagaggtgtaccccacctttttattttttagaagctagacattcaggaatgtgaagtgacctcctctctcaacttagtgtaagtaagtgcaaattctagaacctaggtcagctgactcccagcttagtgctggtctcacttacttctcagaaaagctttttacagccagtctaaagagtgagatccccttctttgtgtcacagagttttacttaacatggaaaggtattacgtagtggctttataatgtaaaccacaacattattaaagaagaaagtctccagcctcaaccttctttatttctttatgtgtccagttagaaaccatgtttgaatgttagcgctaatgcagagatctggaaacggaagggttagtgagaaagagtaacgttatgggagaaagaatattatccacgacaaggacatggctcccagagccaatggaaaatcaagatacattttgtagccaaacgacagggacaccacacatttgctatttattgggtgtttcctttgcagcatttgccagtcatatctctccaggcaattacttttcttcctatgtgaataaaagacatacttcccagatgccacctagaacccatggatgcagcatttaagttacatcattcacaataaattgattatcttgttttcagttctctgttggttgcaaagcctacttatactttatattctaagcagtttctttaaatgaaacacgacgttggaggcttagggaagctggcaatacaatttgaaatcattatttgtttgaattcttgttaatagattatgtcaatttactgacgagggagaacttagagaccgagaatgatgtcctttaagaatagtgatttatgactaagaaaatgtagaaaagatagaaaaggagttaataatctcctttgtcttagaaagaaagttgctgaggaaaagagtgaaaggaagactgaaaaatcacctcagaatgatgccaaagaaaaagtagctcttggatcctgacgggggcagatgatcctgaagggggcagatctttctacttttatgacaagagccatgtttcttgtccaattctctatggaattctctttatttgaatcattgctttaaaaaatattgtctccaaattgatgttgtattaaagttgtctaagttgttgaatggggagttacattttgaatggggagttacatttctgtgcaaagctgtgagttaaacttttggcctgtgaaatcaggtataatgcagagacattgtcttgatcttaagaaaagactgttggtgagacatacttatagcagccaacacgccaaacaatcaaaaacaccagcatgtgaaaccctcaaagtacggacaccaagaaagagtttggtgacaatccatcagctacatagaaatagaaagtgagccaggcagcataaggatatatgatccaacgtgatctttttttatttttttttttgaggcagagtcttgctctgtcacccaggctgcagtacagtggtgtgatcttagctcactgcaacctccgtctcctggattcaagtgattctcctgcctcagtctcccaagctcactgcaacctccgtctcctggattcaagtgattctcctgcctcagtctcccaaatagctgggactacaggcgtgtgccaccatgcctggctaatttttgtatttttagtagagacggggtttcaccatgttggccaggctggtctcaacctcttgacctcaagtaatctgcctaatctgcccatcgcggcctcccaacgtgctgggattacagctgtcagccaccgtgcctggctgtgatcctgttttttttttctgagacagagtcttgccctgttgctgttgcccaggctagagtgcagtggcatgatctcagctcactgcaacctctgcctcccgggttcaaggattctcctgcctcagcctcctgagtagctggtattacaggcgtgcgccaccacacccagctaatttttgtatttttagcagagaaggggtttcaccatgttggtcaggctggtctcgaactcctgaccttgtgatccacacaccttggcctcccaaagtgctgggattacaggcgtcacccaccacgcccagccaatcctgtctttaagcaattattttatgatatatctcagttgttcattatcttactctttttagtatcctctggattatgcctgctttatacacaggtgttcgatacatttggcttcatctgaatcaagtgcagaaaatgacactaccaagtaaatccttgaagcagaacctccttaaaactcttatcaatcgggctgaggcatgtgttcacatcacagagacccatttgtctaactgtattttcacaggtgacattgtgattatacacgagaaaaaagaagaaggatggtggtttggatctttgaatgggaaaaaaggccattttcctgccgcttatgtggaggagttaccttcaaatgctggcaacacagctacaaaggcataaaacaagactctgaacatactaccttcacactcggtaatcaacaatacagtgtggttcaaataagaataaagtgctcttacctttacatgtttttcttttg

SEQ ID NO: 2225 - DNA, 296 bp, Homo sapiens
gacttggatcaaagagtggggacacagcagagaagagcagaaaccttttgcagagagaaaggagcttacctggatagagctgaagatgatggatgaggggaatgtcaaaggtccccggatgctgtgatccagcatggaggatctggatccctggactttctgctgagcagcaatggagacaggattgagaaaaccagtgagctagagaatccaggttgtatttatgcagatagaaggtcagttccaggaaactaaggggaagtatgggtgtttgagatcagggaaatcctgctgaa

SEQ ID NO: 2226 - DNA, 472 bp, Homo sapiens
ggtaagatttgcatacagtgaaatgcacaaatttaaaatataccatttggtgagttttgatctacaactgtgtagctcaaacctctgtcaagaattagaacaatatcacctcagaaagtcctctcttgcctgcttctaatcagtcttcttgcacgtcaggcaaccattgtcctaatttaaaaaaaattatagataagttttgcctattctagaacttcatgtaattggaatcatacaatatgcatactttgtttctgtttttttcaccttagtgtttttaatattcatccatgtttatccatcctattagtagctcattgctttctgttgctgtgcagtattccattgcataaatataccacactttttatccattatcttttgatggacttcttggcaatttccatactttggctattatgtataaagattctatgaatattcttgtgcaagtttttcatggacataatgt

SEQ ID NO: 2227 - DNA, 472 bp, Homo sapiens; identical to SEQ ID NO: 2226

SEQ ID NO: 2228 - DNA, 502 bp, Homo sapiens
ggaggcagaggttgcagtgagccctgatgacgccactgtactccagcttgggcaacagagcaagaccctgtcccaaaaacgaaacaaaacgccctttgcatgttcagtgactggaatgtcagaagtgaaattgatgaataatttttgtaatatttaagtgcattcaaaatgttggacaggtaatttagatatctgggaatattgtagtttactggtttttttttttttcattttagtactagttgcatatatgctctgacatgaggtattgaagaaatatgaaatgtgtagtctctgctacgcttataaaacataattctgaaaatgatctttaatgcaaagaaatatcttctaggtttattttatacttattgatacttatatttagttcacattcaatctcttagatataagaaaactgtgagtgattatcagtttgaagggatttgtatattaatgtttgtatgctttttagtgtaataaaaactgtttcaatcttaaa

SEQ ID NO: 2229 - DNA, 338 bp, Homo sapiens
acagcttctcaaaatcaaatatttgatggtgaatttgattgtaaacacttaaaagtaattagatgaaatatggttgcatacttaaacaagagtaagttcttagaatatgcaatctaattaaacattaacagtcaagcaaaatctttgtatacgattttgagaaattgttcaatatatttttataaatcttttatattgattaaagctagtagttataatttgaacatattatttatttttagtttccaattgctttgtaatagtggaaagcaaaataaatgagtaaataaaaataaaaataaaaatatcgctcatatcagtcctgacaacttaaacta

SEQ ID NO: 2230 - DNA, 502 bp, Homo sapiens; identical to SEQ ID NO: 2228

SEQ ID NO: 2231 - DNA, 702 bp, Homo sapiens
aaaccaggacagtggctggagtgtgggggtgagaagtgggtataaagtggagaggagatgagcttggtctctgctctggtctcagcctttatgtactgtcttggtgggatgaccgtggttgggtcctgcctccaagggtatcccagagggttctagaaactcccacatggacaggcacttgaaggatagtgctggtgattgggcaggtgcctggatggaggtgaggcctaaagcacacccggggacagaaggcagcacccacacgggagcccagcttcgtgccagggactgtattttaggtgctggatcttgtttaaatcttccggctggctatgattatcctctaagctggggaaggaagaaaagcattccagtactatacctctgtttgggttaaaggaggggaaagtattttaaataaaacctattagagttaaaaggatgagtagcaataaaaatatctttgaatctctgatggttctattgtagtcaaaagttttagataaattgtgaagaatctctaatcatgctatgtggagtttttctcttttaaaaaatacaagttattgtatatacttaaggtatataacgcgatgttatgaatacatttagatagtaaaaaggttactatagtgcagcaaatgaacatattcatcatctcagctggcacaaaagtaattgcaatttttgccattactttca

SEQ ID NO: 2232 - DNA, 702 bp, Homo sapiens; identical to SEQ ID NO: 2231

SEQ ID NO: 2233 - DNA, 704 bp, Homo sapiens
  SITE (538): n equals a,t,g, or c
  SITE (624): n equals a,t,g, or c
aaaccaggacagtggctggagtgtgggggtgagaagtgggtataaagtggagaggagatgagcttggtctctgctctggtctcagcctttatgtactgtcttggtgggatgaccgtggttgggtcctgcctccaagggtatcccagagggttctagaaactcccacatggacaggcacttgaaggatagtgctggtgattgggcaggtgcctggatggaggtgaggcctaaagcacacccggggacagaaggcagcacccacacgggagcccagcttcgtgccagggactgtattttaggtgctggatcttgtttaaatcttccggctggctatgattatcctctaagctggggaaggaagaaaagcattccagtactatacctctgtttgggttaaaggaggggaaagtattttaaataaaacctattagagttaaaaggatgagtagcaataaaaatatctttgaatctctgatggttctattgtagtcaaaagttttagataaattgtgaagaatctctaatcatgctatgtggnagtttttctcttttaaaaaatacaagttattgtatatacttaaggtatataacgcgatgttatgaatacatttagatagtaaaaanggttactatagtgcagcaaatgaacatattcatcatctcagctggcacaaaagtaattgcaatttttgccattactttca

SEQ ID NO: 2234 - DNA, 348 bp, Homo sapiens
tctctttggatgccaaagagtgggaggggcccagcggagtggtggccagagtaaccccccgccatcccatcagctcagacaagggtcaaagcttggggccaagcccacggctcaggaagggtttgccaggcccccagatcccctctctctgagatagctgtgagcaccagtgttggctggggtgaaagccgggtaattttcctctaagctgtcctccctccgctcccctccctgcctgctggtgctggctgtgagcacgtctgcattccagagcttaggagagagagaacctgctgctgttaaggttgaggaagtagattgctaacagctgctgtaggaggggttgga

SEQ ID NO: 2235 - DNA, 348 bp, Homo sapiens; identical to SEQ ID NO: 2234

SEQ ID NO: 2236 - DNA, 2512 bp, Homo sapiens
agccaggctggtctcgaactcctggcctcaagtgatccacctgcctccgtctcccaaagtgctggaattacaggtgtgagccactgcacctggcccccattggactttttctctaactgatttgtacttgtatcaagttctggtgagtccgtgagataatatggccattctatccctgtggacactgaagctcagagaggttgtgtcccttgctcagcatcactcagttgtaagtgctaggactgggatccagagccctcacttttttgtttttggttttttgcttttttgagtcagggtttcactctgtcacccaggctggagtgcagtggcacaatcataacttactgtagcctcgacttcccaggctcaagtgatcctcccacctcagcctccccagtagctagaactactggtgcatgtcatcacgcctggctaattttttaattttgtgtagagacagggtctcactctgtttcccaggctgttctcaaactactgggtttaagctatcctcctgccttgggctcccaaagtgctgggattacaggcatgaaccaccatgcccagccaagagcccttgttcttttgggtgaggcagaacaggcaaagtcagagaggaggggagggggtgtcattaggagtctcatggaggggattgggtagcaaggctggctctgtaggtgttggcttgaggccctctcctgagatgcatccccatccctggtaccagccttgtttggaaccctccctgtctcccttgctttgtatgcaaagacacagaggtagagggctaggtatgaggtaggtatagggcaggtataggggccagtgagctgtatgtgtgtatagggtctggacacatgctgtaggtcatctttggatgttatgcttactgagcacctgctgtgtgccaaacacagtgccagggctccttcagtcctaccagacaccccaccaggttggcatcttcacctcattttacagaggaggaaattgaagtgccgcagaaggtgccactggctcaagttccctggtggtagggatttgggctctgtccagattcatccctgtacattgcctcatattccttaggttggaaggtcacttgtcctcaccctgttggtcatttttggtatctccagcccacagagactccgcaggcactcctggatcccattgtcttttccctcttccccgcacctgcccccttttgtctttctcagggagttctccctgcagagtgcctttgcggggcatggtccacggatccctcacatttatggtctcatttaatcgtctcaactagccttcaagaaaggcactttgaccccgattttccacatccagacaatgggctcacacttcctgccagagcccagcaaggaggaaatcttggccatagttggtatgggaggcttggggacacagaagggctttgtttgaagccagcagcaggagggatgtggcaccatcatctgatgtgctgcatcattcattgtccccatcgggaaggtggttggcctggggaagcttccagcattcctggtagatcccagtgaaggatgaatctgatccctaggcaggcaggaggggaccctggccagatgcacaaacttgtttgctttttgctgtgtgtcttttagcatccttgagtcccagggcctgaagggttcttggacatgggccgattttcctgtcacctatgtcccctcaacctcatcaccactgggcagctcattatctctctggaaaaggggaaggaaaccagcatttgtctttccatttttttttttttaaactgtggaaacatacacacatcataaaatttgccatttaataggccgggcgcggtggttcacacctgtaatcctagcactctgggaggccgaggagggcagatcacttgaggttaggagttcgagaccagcctggccaacgtggtaaaaccccgtctctactaaaaatacaaaaattagccagaaatcacttgaacctgggaggcggaggtggcagtgagccgagatcacgccgctgcactccagcctgggtgacagagcgagaccccatctcaaaaaaaaaaaaaaaaaagaaaggcatttttaaccctatcttacatgtaaggaaattgaggctcagagagatagaaacttatccaagtctctcttttaacaataaaagcagcctcctttatatgtgcttattctgtaccaagcactgtgctaagccccaaatgttctttaccttattaaattcacacaactaccctaggaaaaaagtattataatccccgttttatagatgaggaaacggaggctcagagagccaaaacaacttgctcaaagccacactgctaataagtgatagaccggggacttaaatgcaggcatttctggtgggagctctttccacgatcacataacagaaggttgctctctgtttttctccctcttggaaagtccttcctctgcagagcaggaagctgcctcctgtggcttctcctgctcattct

SEQ ID NO: 2237 - DNA, 2529 bp, Homo sapiens
  SITE (53): n equals a,t,g, or c
  SITE (74): n equals a,t,g, or c
  SITE (647): n equals a,t,g, or c
  SITE (832): n equals a,t,g, or c
  SITE (929): n equals a,t,g, or c
  SITE (1035): n equals a,t,g, or c
  SITE (1323): n equals a,t,g, or c
  SITE (1444): n equals a,t,g, or c
  SITE (1534): n equals a,t,g, or c
  SITE (1556): n equals a,t,g, or c
  SITE (1576): n equals a,t,g, or c
  SITE (1606): n equals a,t,g, or c
  SITE (1756): n equals a,t,g, or c
  SITE (1760): n equals a,t,g, or c
  SITE (2433): n equals a,t,g, or c
  SITE (2445): n equals a,t,g, or c
  SITE (2487): n equals a,t,g, or c
agccaggctggtctcgaactcctggcctcaagtgatccacctgcctccgtctncccaaagtgctggaattacanggtgtgagccactgcacctggcccccattggactttttctctaactgatttgtacttgtatcaagttctggtgagtccgtgagataatatggccattctatccctgtggacactgaagctcagagaggttgtgtcccttgctcagcatcactcagttgtaagtgctaggactgggatccagagccctcacttttttgtttttggttttttgcttttttgagtcagggtttcactctgtcacccaggctggagtgcagtggcacaatcataacttactgtagcctcgacttcccaggctcaagtgatcctcccacctcagcctccccagtagctagaactactggtgcatgtcatcacgcctggctaattttttaattttgtgtagagacagggtctcactctgtttcccaggctgttctcaaactactgggtttaagctatcctcctgccttgggctcccaaagtgctgggattacaggcatgaaccaccatgcccagccaagagcccttgttcttttgggtgaggcagaacaggcaaagtcagagaggaggggagggggtgtcattaggagntctcatggaggggattgggtagcaaggctggctctgtaggtgttggcttgaggccctctcctgagatgcatccccatccctggtaccagccttgtttggaaccctccctgtctcccttgctttgtatgcaaagacacagaggtagagggctaggtatgaggtaggtatagggcaggtataggggnccagtgagctgtatgtgtgtatagggtctggacacatgctgtaggtcatctttggatgttatgcttactgagcacctgctgtgtgccaaacacagtngccagggctccttcagtcctaccagacaccccaccaggttggcatcttcacctcattttacagaggaggaaattgaagtgccgcagaaggtgccactggctcaagnttccctggtggtagggatttgggctctgtccagattcatccctgtacattgcctcatattccttaggttggaaggtcacttgtcctcaccctgttggtcatttttggtatctccagcccacagagactccgcaggcactcctggatcccattgtcttttccctcttccccgcacctgcccccttttgtctttctcagggagttctccctgcagagtgcctttgcggggcatggtccacggatccctcacatttatggtctcatttaatcgtctcaactagccttcaangaaaggcactttgaccccgattttccacatccagacaatgggctcacacttcctgccagagcccagcaaggaggaaatcttggccatagttggtatgggaggcttggggacacagaagggnctttgtttgaagccagcagcaggagggatgtggcaccatcatctgatgtgctgcatcattcattgtccccatcgggaaggtggttggccntggggaagcttccagcattccntggtagatcccagtgaaggnatgaatctgatccctaggcaggcaggaggnggaccctggccagatgcacaaacttgtttgctttttgctgtgtgtcttttagcatccttgagtcccagggcctgaagggttcttggacatgggccgattttcctgtcacctatgtcccctcaacctcatcaccactgggcagctcattantctnctctggaaaaggggaaggaaaccagcatttgtctttccatttttttttttttaaactgtggaaacatacacacatcataaaatttgccatttaataggccgggcgcggtggttcacacctgtaatcctagcactctgggaggccgaggagggcagatcacttgaggttaggagttcgagaccagcctggccaacgtggtaaaaccccgtctctactaaaaatacaaaaattagccagaaatcacttgaacctgggaggcggaggtggcagtgagccgagatcacgccgctgcactccagcctgggtgacagagcgagaccccatctcaaaaaaaaaaaaaaaaaagaaaggcatttttaaccctatcttacatgtaaggaaattgaggctcagagagatagaaacttatccaagtctctcttttaacaataaaagcagcctcctttatatgtgcttattctgtaccaagcactgtgctaagccccaaatgttctttaccttattaaattcacacaactaccctaggaaaaaagtattataatccccgttttatagatgaggaaacggaggctcagagagccaaaacaacttgctcaaagccacactgctaataagtgatagaccggggacttaaatgcaggcatttctggtgggagctctttccacgatcacnataacagaaggnttgctctctgtttttctccctcttggaaagtccttcctctgncagagcaggaagctgcctcctgtggcttctcctgctcattct

SEQ ID NO: 2238 - DNA, 565 bp, Homo sapiens
cagaattataaaactccttcgaaacttgctctgagcctgtcctccacaaatacattcagttccctacaaaataatgataaagcatccttcaaggacagataatggacctgttatttccctacagcttgagtagcccctgacttaagaagagcaactgaatcatgggatgctggtgtgagttactcaagtcatcaaattctatcattcaaagggatctcaaggtcgtcttgtccagtgcttcccatgtggtataccagtatgccaccacatacggctgggccactgcagagtggcgggtgagcctcaagtcactgactcccttcagctcagatgtaccttgtgtacaacttacaagaataatcatgatgatgtgtgatttttgctttacatgctaatgttagatcctaatgtgagtaagagagatctcccctgaactacatggtactagacttcatgtgttaatattctggtgtattatttgttgttgtttggccagggatggaaaaactcattccaaatgtgcttattattaatatatttgttatttgcaagaagttacacaggc

SEQ ID NO: 2239 - DNA, 565 bp, Homo sapiens; identical to SEQ ID NO: 2238

SEQ ID NO: 2240 - DNA, 5519 bp, Homo sapiens
ttttctttctttttttcatttcctgggtactgggttgctcagcactggcctctcaagttgctaactttttgaaatcctgaggtatagaattctttgttctattcctggtctagctggtataactcagcccatgcaaactgtcctggcccttcagtcttttcatgctccataactttcacaagatgctgtacacctgctacagacattggtctctaaggagttattctctagtgaatctctttctcccactcaactccatgtggggatatctgacccttctatcagtacaacgataagactcagattgggtcttttgtttgtttgtttgttttgagacagagtctcgctccgtcgcccaggctggagtgcagtggcgcaatctcagctcactgcaagctccgccttccaggttcatgccattctcctgcctcagcctcccgagtagctgggactacaggcgctcgccaccacgcccagctaattttttgtatttttagtggaaatggggtttcaccgtgttagccaggatggtctcgatctcctgacctcgtgatccgcccgcctcggcctcccaaagtgctgggattaccggcgtgagccaccgtgcccggcctcagattgggtctttattttgacctcccctcttattcatgccttagacggaagagcacacacacacacacacacacacacacacacacacacacaggcctaggtatatgccagtcaagcttgggaaagcagagtggggggtgggggtggcttagtgcaaacaggggtcagttcagtccctttgctgtgtgcctggtggtgagcttcttgcctgaagtcccagtggtcacttctgctctgtttacttctcactgaacattaaaatgaggcccagggagaaaagcacaaatgtcaaggaagagagatctgtggaggaatatgggtggagaagcctggaaataaagacagagatccaggaaaggaaatgcagagacaaagagaggcaaagataccaaagcagacatacttggttggaaagcggcagggaggtagagagtgaggaggaaggtgggggaaggggacatcaacttggaaaccatctctggcaggaggcaatttagcttccagatgcgtgacaggggatgggatagggtaggagaagcaactttaggaactggatgttccacctctccttggtcctgggacctgtgcctgttcactggtgccctgccccaggcctccacacatgagcttgcaatcctgttctggtggctgaaaatcggggcctggctacctggaaaccgcaggagctgggagaagccccaaggcccctgggagcctctggaggaggggctgggctaggaacaggggctgaggccagttctgttctccagatgggctcatccagtgtagtggctgctcggggggcaagcacagtgggagccaggggttctgcagtgggctggggtgccggagtggaaaaccggcgaatctcctggactcgggcagttttgggggaccctgaggcgatagggccaggagtcgggggaacctcatcaaaacagaacatggcagttttaagttgatagggctgatgccgcataaaatctagagccttgatgccctgcttgggtgttgcccgaggcccctgggattgggccttagggagagttcgggccgcctgggggaaaaagggagagagcagtgggttgtaagcaataggaggcggggcacggatgttgggtgaatatttccaggaagggggcagagacggggtaggagaaggacttctaggccgagggccaagaccaggaccaggtgtaccttccaccacatacctgtccgcacggctctgccgcttagcaaacagctccccacccctgccctgcagccttggtggctcagggattccagccgaagaggctgccccattcacgagcccatcaaggagccctcgagatgggggcttaggagccactgggggtggagtcttaggagtcatagggggcggggtcttgggagccattggagggggggtcttaggtgtcacgtgaggcagggtcttgtaactcctggcccctactggctgcatgaagttgcaggcttcagccccgaggctcagagcatcttcttcaggaccagattctgcacccccggcccgaggcttttcatccaggttctgtaccagcgatagcagctcggggttgggcgagttcttcgtctcctcctttcccggccggaacatctgcttccgggtcccccggcgccgggcctcctgcaggatacccgtgcgggcagctggcacagagatgcgctgctcgcgagcgctggggggctcaggagcccctgggcctggggcaggcgcctctgggcgcgcagagggtcgcaaaggcgcagataggaagatagaagcggtggaggtcatggcagctgcgctaggaggagcggggggctctggagctccacctggggtgacaggccgactaggggctgggatgtacagggagctggtggctgtcacagggcccgaggagcgtggggtgctgggggaaccagagactggcgcgtggctgggaacccctgaagtgaagctgggcagaggggtgggcccctgcgaagacaagaaggggggtggggcggggctgaggccccccaggctgtcgttcgcccttttgggggctaaaggccggaaaataaccgaggtggtagttggccgctgcccttgtaggcccggggtaaagggcctggctgaccggttaaagatgcttggagctggggtcggggctccaccacctggttggaagggtctggggctggctacaggcgccggcaaggggctgggtgggagcacagctgcctctgggggagcactctgggcccgaggtggtgactgcaggccttccccgttgagcatggctgctggttcgacccgtgccagttcctgggtgctggagtctgcgcgctggcgctgctgttcaaagagctgcacccctcgcccagagacctcactcagctgccctcccagcccagagccctggccctctgatgctcttgagcccgccctggcaagctccatgtccagatagggactgtcccagtcagattgattggtgaggctgcgggcgtcagagaaggcttcttcgtccagctcggactcactcgtggggggaacgccgtcctcctcctcagcgcctgtcccagcagcagccccgaagctcaccagggtgtacttcttggctctctgccgccgtttcttaaacataagtacccctttggagtgggggttgggggctgcagtgagcagggatgcaattgtcctgcatttggtcttggcctcttttatgctcttctcttggaggctctctgcacgttgcagttctggggaggccaagaggtaaaatggtcaggggggcttcccagcctcttttagtcctgttccccaaggctttcaccccccatcccagcaagctccctcttgcactgacccgacccacaatgtcccctgtgacaaagtcctctgacttaggggcagagtggagggtgaaaggtgaaaccaaggacagttaaagataaggcagagtccagttggctgccctgacactgctctgaccacagctcttccatcccattttactgctattctgctcctatcttccaagagatgtgctcttatccaccccacacacattcctcacctgcctcccattcctgactggcaatgggagggggaggagaaggatgtgtcactctccgtggcagacagggagataagcaggtcccagggagaggaaagatgagaaggaacactttccacccatcatagggaccatgttaggaggcttctcatgaagcttaggactcatcctctccactaccccttacccctatgatatgagcacaaagaacccttagcaatgaggatcttcattcacaattccaccctcctcatgcaatccacatcatacacattcacagaaataactcccaccacacagcacttcaacaagaatatccatctagtgaaagccaactgtaggcgtactttctcctatttacttttctctctcattcacatataccccagcttacatacagctccattcacatacacttatgtaaatacacatgtgtgcacatcaaaacaccatcactcaaatacattcacacacctacatgctctaggtggcccttcttcccagagacctccctgcagagaccctgttactaacagtttagacagaagttaaagttgatctcggccttccaactgccagggcagtcctctgggcttcacacccctgctactcacagtcaggggtagtctccatccaagatgcaggaaaagttagagtgttgttctccaaggcaacactccaaatctttaggatacctcaaggtcgccagctaaatatattatttaccccaagctggggatggtagtggggtgggcttcttcaggggtcagaactgtctctacgtagagagctcaggcagccactgccagccaggcacacaaagactatgtgctaaagggaaccagggcagggctttccatgccatgtggggcctgggtaggtggggccaggaaatgggagggctaccctgctgcgaggaccccgccttgcacatggatactctctggtccatggtccccagttcctcctgaaaaattattgagattccatctactttccactcaaggtaccatgctcctttgtaatgagctcctttgtaatgagctttgtaatgagctcctttgtaatgagcgtggtatcttgagtggaaagtagatggaactttttcatttttgtcattcctctcatcccagtgtttataccacagaatagtggtatggatgagacaacaggccctagagtcagagttcagttcaggtttttggtttctgggatagttacctcacctcattaaagttcggtttcctcatctgtaaatgagggtagacaatggctacctcataggattgctataaggattaactgagataatatagtaaatttagcacttaacacagtgtgaaggcccactataaccattactattgaagtcttcttgacactatactttcttgatatatatggatactttcttgttcacacatatcttctcccatgactcacacatacatgccttcatgtattcataatgtactcacacacgctctgttcccatgagttttctacagctcttgtggtcagaaacccctttgacatgtgaccacagcatcactgagaaaggggcagtgaaactctcctgagaaaaggaggaagaggacagcaaaaaggaacaagagagtaagacctttcccaaagactacccttcctaaactattgacatcttcccctccattctagaccccagactctcatagatatgggagggtagtacctgcatagaacgagtcttggagctcaggaactgggtctggggctttgtcatagctggcttggctgaggggctcttggctgatgggctcaaaggtctccatgctgagaaaggcggtgttggct

SEQ ID NO: 2241 - DNA, 457 bp, Homo sapiens
gaaggtatggggcataaatttattcttgtgcacaaaccaaagtattgtgactcacacccaacaagcaaaggaaattatcactttccagattacacagcaaacgtagctggtggtggtcttggtgagaagggagtccatactaagattggagatcaggacctgaagctgaaaagaagcaatagctggggttttgagggatggggtgggactgaaaggaggttttggctctgggtatttccctactctttcccaggcagtcatggcaagctgcagaagacacactgaagaacagactcaaggaaaatcacacagacaccaaccgttctttcaacactcagcacacaccctcacacctcccttccaccatcattcccttccattctaacattcttctccctcaaatttttttccaatccccctctcacacacggttggtttcttgttactcaactttacc

SEQ ID NO: 2242 - DNA, 327 bp, Homo sapiens
aaccccaccccagtagacaatgaggtctgcttgactaaaaatatctctgagccagtagctacagtctcatccagcattatgggaagggagggggagataagtggagaattgaggaaagcataggatcctaggcacgcatctggaattcctgggatattggacactcagggatgtcagactctcaactctcatgtccttagcctccactccaaactgagagacacaaagttctatagatcaggaatcaaaatggtggaggagagggaagaaatataactagagggggaatcatgagattttggaggtaacaagaacggtctctgtggg

SEQ ID NO: 2243 - DNA, 4385 bp, Homo sapiens
tttcaaggacagatatcaatgaaaacttttatttactggtaaaatataaaaatccaggtctcttaaatccacacaatctctccaaatatttggcaagattgattccaagtccatatgggtggataacaagaacaaaggggtctctgctcagagagacgtattgtcgttcagagttctgccctgcttccctctaaatgctcaccaacctggactcttctaaagtgggcagacaagccctattctaagcgtaggaatagccccatttgtgcgtgacactaagttcctccaatggtccaaactgagcgtggatgactatccaacatcacacacaaatgcacatcccctctctttacaagacatgcagaatctcaagatatgtcaagatatgcagcaagtttaatacctgaaggttaacataaatgacaacaggacacagatgcaatgctacagtcaaatgtggttggggatggaagggggcagagggacactggatatcatcacagcaaccagtgagtgagtcctctggtgccctgaggaggttgtgagccacttgactcgtgtcacaaagaatggagtaaactaacaactctgaaagacaagagggtggcagcattgctgagatgagactcaaggcaggggtctgcagctctgtcacagagtgttaatgctcaacgatgcctgggctcaagagcgttctggtcagcattttaacatcagaagaagggcttcttcaggacacactcccttctcttaacatgaggtgaagaaacccatcccattctgaaaccaggtcccataataccttggtcttttgatacacagcagcactacacaccactgtgccccccagccagcttcactctgtctgctaagcacccactctgcaaacagatctcagagtgaacaaatccagaggaggtgggaggagccaccatggtgggatgtgagggacaggagttggctggaggagcagatgggtcccatgtcaggaacctcctaggcatcatgaagattgctatcactcagaagcaccttttccccaggtttgaaggctggcatcccaaggtaggggcagctggcacagcggaaggcatcgcccaggtagcactggagagagagaatggggaagccaagggtcagcttatcccaggcataccagccagaagaaagaaatgcctaatttcataatgtggccacagtggcctgaaggaaatggctatgtttgcaggtccaattgagaccaaaatactaagagttttcaagatttctggtttcgtgaaaaactatagtcatgaaaagttccctaggaggccatagttcttttttttttgtttttgagatggagtctccctctgtcacccaggctggagtgcagcggcgcgatctcagctcactgcaagcttcgcctcctgggttcccgccattctcctgcctcagcctcccaagtagctgggactacaggcgcccgccaccatgcccggcaaatttttttgtatttttagtagagacggggtttcaccatgttagccaggatggtctcgatctcctgacctcgtgatccgccctccttggcctcccaaagtgctgggattacaggcgtgagccaccgcacccggcctttttttttttttgagatggagtctccctctgtcacccaggctggagtgcagtggtgcgatctcagctcactccacctcccaggttcaagtgattctcccgcctcagcctctggcatagctggaattacacacgtgagccactgcgcccggccatagttctatattctatgcagttcaaaacacaaccaactttagctaactgtctaaccatcaggtcccactctgaagtacaaagaaatgggccaaaaataaaaagcaacaagaccctccctgaccagcacaagcacgctaacccactctcactctcaggagacagcctctctccccattactacctacgttcgtgtgctcacgcattcgtctgttactaaaatatttgaggtggagcttgtctgtgtttagtttagaagaaggtctaatccccctgggggtttgtgaatgctgaggaatgatcctgatatttacgtttccacaagctgacttgggttgggagctcatctgttcccttgacttctctttttccagttcttcggcaaggccacaggtgctgcgggaaaatcagtaactaatgaacgagaattgtcaccacccagaaatcccaaatcctaacagtgccaaaatgtgctttaagccttttctcttcacaccagtgtcataactcagaagcctataggccaggcagacagcagcaatatgagaggctgctgagggagacagaagtgggaggaggatgagggaagtaccgtgtgtgctctgtctacagagggcagccactactcaagcttcagctggttatcatgctggggaaagtggacccagattgccatattttccaaattcaagaacagaagggaaaaaaatctgtgttttcacttgaaatttcctgatttgtaaatgctggcagcttttacatttaaaaaacctgatgattaacgctgatgatgacatcactgattaactttctacaatccttcccatccatttataaaaacaaatgtggagacaccaaggtctcgctctgatgcccatgctggagtgcagtggcacaatagtggcttactggtagggttttgagggagagtgaaattagatacatggcacaattacggctcactgcagcctcgacctcccaggctcaagtgatcctcctgcctttgcctcccaagtagctgggaccacaggtacataccaccatgcctggctaatttttttttttttttaattatttgcagagatggtctccctgtgttgcccagcctggaaaatgtatgttctaaaaatagtacagcaccgcgatgtcttcagcatgaagccactggaggcagcatggcaggctccagtcaccccagcactcaccagttcttacaggccttcctctttttcccttccccacaagaagcagcccgcagggaagctggatctggcttcttcaaatcttctggatccagcagctcatctgagtcaatgagatcctggagagtgttcaaagcaatgagtgatacagtcgtggtctctgctaatgaaaagctaaagtgactgcaggcttcgagaggaaacttggagtccagggtaaagaaggtgtccaccctgtcctccttttggttgatcatcatgttcaacctgaccacatgctcaagaggccaacggtgagttaaactacatccacagaagatgcactaggatgcaaaggaattagaaacaatttacatgagaaaaagctgtatgactggccagcaatgtgtagagaatatacacatgttgggggttgggggcaggagtggggagaagggagggaacaggcagaacagagaaagagagaagtgtttatgaagagtcacgtgaaaaagggaataaaatatcttttacataatcccagataaaaatcaaataattatatatacctttatgtaattctttgtaaatgtgtagacacttagtctgtaaaccctatgagagcatgaacctcacttattttgctcactactctaacttcaatagtagaggtgtagaaatgaagaactttattacagacatggccaaagatagaaaatagtgctttttaaagcatggaacagtcagcaacttgcccaaaggtgccaataaaactatttaagctgacaaaatcttttcaggtttacacatgcccacaagagttttcaacatatcgtatgaagtgagaacaagaaattatgtggggaaaaagagatgctaaaaaatttaaaatgccaccaacatggccaagcgcagtggctcacacctgtaatcccagcactttgggaggccgaggcgggcagatcacttgaggtcaggagttttgcgaccagtctggccaacatggtgaaaccccgtctctgctaaaaacgcaaaaattggccaggtgtggtggcacatgcctgtaatcatagctacttgggaggctgaaacatgagaatcgcttgaacccgggagcagagattgcagtaagccgagattgtgccattgcactccagcttgggcaagagagcgagactgtctccaaaaaaaaagccaccaacatggagtttccttctaaatcaaagatgtgacaggcatagtcacaaatctgggctttaaatacgttcacacctacaagtccagaaaggtcactatagctgttcacacccaaactggggcctgaaagaaagcaatcaagtgacaatgctgccagctcaccatgctgtcgtcctccatatcgttggctgagagggtccacagcttggcagcagcagggtccacagcaggtttcac

SEQ ID NO: 2244 - DNA, 11161 bp, Homo sapiens
tttcaaggacagatatcaatgaaaacttttatttactggtaaaatataaaaatccaggtctcttaaatccacacaatctctccaaatatttggcaagattgattccaagtccatatgggtggataacaagaacaaaggggtctctgctcagagagacgtattgtcgttcagagttctgccctgcttccctctaaatgctcaccaacctggactcttctaaagtgggcagacaagccctattctaagcgtaggaatagccccatttgtgcgtgacactaagttcctccaatggtccaaactgagcgtggatgactatccaacatcacacacaaatgcacatcccctctctttacaagacatgcagaatctcaagatatgtcaagatatgcagcaagtttaatacctgaaggttaacataaatgacaacaggacacagatgcaatgctacagtcaaatgtggttggggatggaagggggcagagggacactggatatcatcacagcaaccagtgagtgagtcctctggtgccctgaggaggttgtgagccacttgactcgtgtcacaaagaatggagtaaactaacaactctgaaagacaagagggtggcagcattgctgagatgagactcaaggcaggggtctgcagctctgtcacagagtgttaatgctcaacgatgcctgggctcaagagcgttctggtcagcattttaacatcagaagaagggcttcttcaggacacactcccttctcttaacatgaggtgaagaaacccatcccattctgaaaccaggtcccataataccttggtcttttgatacacagcagcactacacaccactgtgccccccagccagcttcactctgtctgctaagcacccactctgcaaacagatctcagagtgaacaaatccagaggaggtgggaggagccaccatggtgggatgtgagggacaggagttggctggaggagcagatgggtcccatgtcaggaacctcctaggcatcatgaagattgctatcactcagaagcaccttttccccaggtttgaaggctggcatcccaaggtaggggcagctggcacagcggaaggcatcgcccaggtagcactggagagagagaatggggaagccaagggtcagcttatcccaggcataccagccagaagaaagaaatgcctaatttcataatgtggccacagtggcctgaaggaaatggctatgtttgcaggtccaattgagaccaaaatactaagagttttcaagatttctggtttcgtgaaaaactatagtcatgaaaagttccctaggaggccatagttcttttttttttgtttttgagatggagtctccctctgtcacccaggctggagtgcagtggcgcgatctcagctcactgcaagcttcgcctcctgggttcccgccattctcctgcctcagcctcccaagtagctgggactacaggcgcccgctaccatgcccggcaaatttttttgtatttttagtagagacggggtttcaccatgttagccaggatggtctcgatctcctgacctcgtgatccgccctccttggcctcccaaagtgctgggattacaggcgtgagccaccgcacccggcctttttttttttttgagatggagtctccctctgtcacccaggctggagtgcagtggtgcgatctcagctcactccacctcccaggttcaagtgattctcccgcctcagcctctggcatagctggaattacacacgtgagccactgcgcccggccatagttctatattctatgcagttcaaaacacaaccaactttagctaactgtctaaccatcaggtcccactctgaagtacaaagaaatgggccaaaaataaaaagcaacaagaccctccctgaccagcacaagcacgctaacccactctcactctcaggagacagcctctctccccattactacctacgttcgtgtgctcacgcattcgtctgttactaaaatatttgaggtggagcttgtctgtgtttagtttagaagaaggtctaatccccctgggggtttgtgaatgctgaggaatgatcctgatatttacgtttccacaagctgacttgggttgggagctcatctgttcccttgacttctctttttccagttcttcggcaaggccacaggtgctgcgggaaaatcagtaactaatgaacgagaattgtcaccacccagaaatcccaaatcctaacagtgccaaaatgtgctttaagccttttctcttcacaccagtgtcataactcagaagcctataggccaggcagacagcagcaatatgagaggctgctgagggagacagaagtgggaggaggatgagggaagtaccgtgtgtgctctgtctacagagggcagccactactcaagcttcagctggttatcatgctggggaaagtggacccagattgccatattttccaaattcaagaacagaagggaaaaaaatctgtgttttcacttgaaatttcctgatttgtaaatgctggcagcttttacatttaaaaaacactgatgattaacgctgatgatgaacatcactgattaactttctacaatccttcccatccatttataaaaacaaatgtgaagacaccaaggtctcgctctgatgcccatgctggagtgcagtggcacaatagtggcttactggtagggttttgagggagagtgaaattagatacatggcacaattacggctcactgcagcctcgacctcccaggctcaagtgatcctcctgcctttgcctcccaagtagctgggaccacaggtacataccaccatgcctggctaatttttttttttttttaattatttgcagagatggtctccctgtgttgcccagcctggaaaatgtatgttctaaaaatagtacagcaccgcgatgtcttcagcatgaagccactggaggcagcatggcaggctccagtcaccccagcactcaccagttcttacaggccttcctctttttcccttccccacaagaagcagcccgcagggaagctggatctggcttcttcaaatcttctggatccagcagctcatctgagtcaatgagatcctggagagtgttcaaagcaatgagtgatacagtcgtggtctctgctaatgaaaagctaaagtgactgcaggcttcgagaggaaacttggagtccagggtaaagaaggtgtccaccctgtcctccttttggttgatcatcatgttcaacctgaccacatgctcaagaggccaacggtgagttaaactacatccacagaagatgcactaggatgcaaaggaattagaaacaaatttacatgagaaaaagctgtatgactggccagcaatgtgtagagaatatacacatgttgggggttgggggcaggagtggggagaagggagggaacaggcagaacagagaaagagagaagtgtttatgaagagtcacgtgaaaaagggaataaaatatcttttacataatcccagataaaaatcaaataattatatatacctttatgtaattctttgtaaatgtgtagacacttagtctgtaaaccctatgagagcatgaacctcacttattttgctcactactctaacttcaatagtagaggtgtagaaatgaagaactttattacagacatggccaaagatagaaaatagtgctttttaaagcatggaacagtcagcaacttgcccaaaggtgccaataaaactatttaagctgacaaaatcttttcaggtttacacatgcccacaagagttttcaacatatcgtatgaagtgagaacaagaaattatgtggggaaaaagagatgctaaaaaatttaaaatgccaccaacatggccaagcgcagtggctcacacctgtaatcccagcactttgggaggccgaggcgggcagatcacttgaggtcaggagttttgcgaccagtctggccaacatggtgaaaccccgtctctgctaaaaacgcaaaaattggccaggtgtggtggcacatgcctgtaatcatagctacttgggaggctgaaacatgagaatcgcttgaacccgggagcagagattgcagtaagccgagattgtgccattgcactccagcttgggcaagagagcgagactgtctccaaaaaaaaagccaccaacatggagtttccttctaaatcaaagatgtgacaggcatagtcacaaatctgggctttaaatacgttcacacctacaagtccagaaaggtcactatagctgttcacacccaaactggggcctgaaagaaagcaatcaagtgacaatgctgccagctcaccatgctgtcgtcctccatatcgttggctgagagggtccacagcttggcagcagcagggtccacagcaggtttcactgagtccaagcaataaaagaaaaaactccataaacacagtcagaaactattaattacaaacatacataaatgcttcctgctgtgtagaagagaacacactggcctgggaggcagaagatgtgggttcacagtccagctctacccctctgagaggtctgaccttgggccaaccacttgctgatagttacagaagtcaccatttgctaagctcttgctttgcaccaggcaccatattaagcacttatatacattatctaacttaattctgctgacaaccttatgaggtaactatctgtcatcctacttttaccgctgaggaaacaggtttagacacttaggctggttccacaggctgcaaagcctgtctgatgcttttaacctccattccatattgcttcctcctcgataccttagtttccattctataacatgaagttaaattgtacttcctatgttactgcaggtgttttgaggattaaatgagaaatgtgtcaaaaccttcaaaaatagcagagctttagcctcatgtaaacctgctacatacaagaaaataggctctagagctgctggtggcaaggtaacaccatcagtggcagacaaacctcacacttcctggttctctgtctagtcaggagaatgcaaggaagaggcagagagctgaggctcggatgcagtgtgggcaaatcctcgcaggcccttggggtaagagtaccctctagtgatcattgtcacagctggatgctcataccttccacaaggccaactgttctaagctattcctacccattctggaaccatgaatcgaaaggttagattccaaaggatttcttgaagatttaggttagacagtcaaaaccgtacaagtgggaatgtaccagtaaatatctgttaatgtctgcatacctcacagctgggtcaattcaggcatttaaaaatagggataggaaggatgaggatggagctgtgtgtgtgtgtgtgtgtgcgtgcgcgtgcgtgcacgcgtgtgcttgtacacaattttctagtcagaagaaatatagttttataagtgtcttagcatcctcaaagtaagaacagctgattttcctggcatggggaaaaaagcacatgagaacaggaacagggcactctcatacaccattaccactacactgtgaggtcttctgaggagaaacgttaattctgggacctggaaggacctcattaattaaactgtgtgactcagtcctgtaaaattaggaggcctcggtatcttctggtgcagaagaaggagctgaactagataatacctatgtattatttcagttttggatcctaatatgcccatgataatagtacattaagtattcttctttgtggaaatggcagaaatcaaaggactaatcctctaaaaatatcaccatctcatttattgctggctcaatttctaacatgtccctctaagcccattcaaacagaagaatgtccctaggccagccttacctgaaggagaagacttcttggtgatggaaagcttaagctgcctagaagaacccacttcaaagtttggttttttgcctgtgatctgaacaaacagcaggttgtcactttcatgaccaaggtgttctcgaacagactgtacttcctcaggggttaggggctcccgctgcagctagaattcaagacatcaaaaggattagttcaccctcctctgtaaaatggtttactatgtctacctacacaggagtcaaagactcatttctgtgcattaaggatgtaacagtggatggtaacagataacactttatgcctcacattcagtttctcactgatcagaaccctagagtataacctttgtctgcatgtttacttggagcctaccccttggaaaatgtaaaagtacttaaaaaacattagggatgaggcatatactagttatttgggatgtaatacaattatgaaaatgaaccagatgtggtcctactgtgtaacaggaaagaatgcccacaatgaagacagcagaaatttatatcccaaaagaaaaagggggaggaaaatcctttctatgttccttgggataaagtagcagagagtaaaggtagaaaaaaagggtcagggtgccacctctatgtccaataattatagactggttacataaatcacagtccatctattgtatggaatactattacatcattaatatgaatgaagggaaatacactgaagtaggtaagtgtctatgatatctaagggtgggaaaaaaggtgattgaacaatgtatacttatgatcttatttacatttttaaaaaagtatgtgcatgtagatgcttgtaaatacataggaaaaggtctgaacggacatacaaaaaggcattggtggcttcctctggggagggaagtgtgagcaagaagtgggatgtcactttatattctgtatgctttggtgtaaagtgaatttttatgaggagtctgatatagtttggatatgtgtcccctctaaatctcatgttgaactgtaatccccaatgttggaggtggggcctggtgagaggtgactggatcatgggggcagatttctcatgaatggtttagcaccatctgaattctcatgagatgtggtggttgtaaagtatggcaccttccccaccccgactcttcctctctttcttgatcctgcttttgccatgtgatgtgcctgctcctgcttcaccttctgccacgagtaaaagttcattgaggcctccctagaagccaagcagttgcaggcccgtgcttcctgtacagtctgcagaacagtgagccaattaaacctcttgtctttataaattattcagtcttaggtattcctttataggaacagaagaatggcctaatacacattccttattttaaaatcaagcacagaaaaccttaagctaaaaggaaaaataagaaagggttggcataaagaatctaaggcctggcataaagaatctaaggcctggctcacgcctgtaataccagcactttggaaggccaaggtgggtagatcacctgaggtcaggagttagagaacggcctggccaacatagcgaaaccccatctgtactaaaaatacaaaaaattagccaggtgtggtggcgcacgcctgtaatcccagctactcgggaggctcaggcaggagaattgcttgaacccaggaggcggatgatgcagtaagcagagatcgtgtcactgcactccagcctgggcaacagagcgagactgtctccaaaaacaagaaaaaaaattaaaaaacaaagaatttaaggccctacattatgtaagaaataacaggcacaacagctatcatgctgtaacatttacctctcccacatccaagaaaattttaagatcaaagagtgtagaaatataaatacttctgcttaatttaaacatttccactgaattgtcagaaaaggaactttgccctctaacctattccagcctcccaccaaaaatgtgaggctgaactagatggcagtgttcacccaggcctaggattcgggtctactgagaggtgggtgttggaagcagcagagctgctgctcatgcccctcagctgtcaccaccactaaactagtaccaaggagacaagaacaagccccagcccacatgggccaagctgagtctctttgaagttggttattctcaaaagtttttttttgttttgttttgttttttttgagacagagtctcgctctgtcgcccaggctggagggcagtggcgtgatctcggctcactgcaagctccgcctctcaggttgacgccattctcctgcctcagcctcctgagtggctgggactacaggcgtctgccaccaggcccgactaatttttttgtatttttagtagagacggggtttcactgtgttagccaggatggtctcgatctcctgagctcgtgatccacccacctcggcctcccaaagtgctgggattacagacgtgagccaccacacccggccgattctcccaagttttgtcctttgaagcatcatgtatcttacatgcacagcatttcttgtttcctagttctaagcaatactgattacctcacctgcagggcagcaaagaaagttgtctacaaacgtacctctttcacttccacaagaccagaaagagtcagggctgaacacagcttagatgctgtcttcactttgctattgttatctgccaaaaggaaaatcccaattaatagctttatagttcaaagtaggaaaaataataaaggctcaatcctatatgggttcgcaggcattcaaacaataataaccaggtgggcgtggtggctcatgtctgtaatcccagcactttgggaggctgaggtggacagatcacttggggccaggagttcaagaccaatctggggccaacatagcaaaatcccgtctctactaaaaatacacacaaaaaaaatagccaggcgtggtggcacacgcctgtaatcccacctacttgggaagctaaggcacgagaatcgcttgaacctgggaggcggaggttgcagtgagccgagattgcaccactgcactcttgcctgcacaacagagtgagacttgatctcaaagaaaaaacaaaaaaaaaataataacctattctgtttaatgtacagatggtccttgacttaatgatggttctacctataatttttcaacttttatgatagtatgaaagtaatactcattcagtagaaactgtatacttcagttttcagtaaattacatgagatactaagcactttattataaacaggctttgtgttagatgattctgcccaactgtaggctaacgcaagtgtcctaagcgtgtttaaggtaggctaggctaacctaagcaattgtgtttagtaggttagatgaattacatgcattttcatcttaatagtatttatcaggatgtaactccattgtaagatgaggacaattgtatatatattttagtgatattattttattattattattattattattatttttgagacagggtctcactttgtcacccaggctggagtgcggtggcatgatctcagctcattgcagcctcgacctcccaggttcaagcaatcttcctgcctcagcccccaccaagtagctggggttataggtgtgcactaccacactgggctaatttttgtattttttgtagagacggggtttcgccatgttgcccaggctggtctcgaactcctggactcaagcaacctgcctgccccagcctctcaaactgccgggattacaggtgtgagccactgtgcctggccatagcgatactattttaatttgacaaatcctttttgttgttcgaagtgtttttacctaagctcttaaatgttataattccattattattgtttttttatcactctctgcttcttgaaaccccttccagaggttgtgagataatgactatgaaaagaggcttatgaactgcaaagtgcacagaaacacaagtattccttctgaatagttccttttttatctctgtatagttctaagacactacatttagtcatgtaaggtttaaattcccagcaaagaatgctgatttatactacacataacacaaagttctatttccaaataaacaatgaacacctttatacatttcaaaatactttcatttctattattctatttgatgaaatggttatgttttgactgaaagtctagtgaaaaatattaaaaatccagacttgaatcactctgacagctataccaccgatcaaaaaagtttttacttcatgaacactgtcattagtttcacatgaatcaataattaccacatcattcccagggttcggccactatttttaaacttttaattttgaaataactatagattcacaggaagttggaaaaaacaaaaaaaagttctgtatattaaggaggtcttcacttcgtccctccccacagttaacatcttacccaattatagcatgatatgaagaccgggaaattgatattgatggtccacataactttttcagatttcatttcttttatatgtactcgtttggcagaagggggctatatagttctatgtaattttattatatgtgtagatttgtgtaaccaccacgacattcagaacacagaattgttctatcaccacaggaaccctcatactacccctttatagctccaccaaccctttcctcccacttctaacctctggcaaactctgatctccaccgccacaattttgttatttcgagcatatgaatggatttgtacagtacagagccttttgagattggcttttttcactcagctacttcccttgatatccatccaagctgatgtacatatagttagctagttcatttttattgctgcatcactttccatattatgaacatatcaaagtttattcacctgcaaaaggacccatttttagatggcagtttccttctattttattacataatgagtcagccaaagattacaatttctccagatatgttgcttcagattttaacaataatttatccccaaggaaaaggttttgctacaggaatactgatctcccaatgatacctcctgctcacggagatgcagcacacatactctaagactcaaccctgtcaaacatgttttccaagtgaagatctccttacctacagctgtctctactggctccttcagaaaaagacatccaccaggccgaaggatccgggcgatttcagccaaaatctcagcactgtgcagagtggtgcttcctgggactaaacctgacaaaataatgtcaaagctggattctttgtgggcag

SEQ ID NO: 2245 - DNA, 13598 bp, Homo sapiens
tttcaaggacagatatcaatgaaaacttttatttactggtaaaatataaaaatccaggtctcttaaatccacacaatctctccaaatatttggcaagattgattccaagtccatatgggtggataacaagaacaaaggggtctctgctcagagagacgtattgtcgttcagagttctgccctgcttccctctaaatgctcaccaacctggactcttctaaagtgggcagacaagccctattctaagcgtaggaatagccccatttgtgcgtgacactaagttcctccaatggtccaaactgagcgtggatgactatccaacatcacacacaaatgcacatcccctctctttacaagacatgcagaatctcaagatatgtcaagatatgcagcaagtttaatacctgaaggttaacataaatgacaacaggacacagatgcaatgctacagtcaaatgtggttggggatggaagggggcagagggacactggatatcatcacagcaaccagtgagtgagtcctctggtgccctgaggaggttgtgagccacttgactcgtgtcacaaagaatggagtaaactaacaactctgaaagacaagagggtggcagcattgctgagatgagactcaaggcaggggtctgcagctctgtcacagagtgttaatgctcaacgatgcctgggctcaagagcgttctggtcagcattttaacatcagaagaagggcttcttcaggacacactcccttctcttaacatgaggtgaagaaacccatcccattctgaaaccaggtcccataataccttggtcttttgatacacagcagcactacacaccactgtgccccccagccagcttcactctgtctgctaagcacccactctgcaaacagatctcagagtgaacaaatccagaggaggtgggaggagccaccatggtgggatgtgagggacaggagttggctggaggagcagatgggtcccatgtcaggaacctcctaggcatcatgaagattgctatcactcagaagcaccttttccccaggtttgaaggctggcatcccaaggtaggggcagctggcacagcggaaggcatcgcccaggtagcactggagagagagaatggggaagccaagggtcagcttatcccaggcataccagccagaagaaagaaatgcctaatttcataatgtggccacagtggcctgaaggaaatggctatgtttgcaggtccaattgagaccaaaatactaagagttttcaagatttctggtttcgtgaaaaactatagtcatgaaaagttccctaggaggccatagttcttttttttttgtttttgagatggagtctccctctgtcacccaggctggagtgcagtggcgcgatctcagctcactgcaagcttcgcctcctgggttcccgccattctcctgcctcagcctcccaagtagctgggactacaggcgcccgccaccatgcccggcaaatttttttgtatttttagtagagacggggtttcaccatgttagccaggatggtctcgatctcctgacctcgtgatccgccctccttggcctcccaaagtgctgggattacaggcgtgagccaccgcacccggcctttttttttttttgagatggagtctccctctgtcacccaggctggagtgcagtggtgcgatctcagctcactccacctcccaggttcaagtgattctcccgcctcagcctctggcatagctggaattacacacgtgagccactgcgcccggccatagttctatattctatgcagttcaaaacacaaccaactttagctaactgtctaaccatcaggtcccactctgaagtacaaagaaatgggccaaaaataaaaagcaacaagaccctccctgaccagcacaagcacgctaacccactctcactctcaggagacagcctctctccccattactacctacgttcgtgtgctcacgcattcgtctgttactaaaatatttgaggtggagcttgtctgtgtttagtttagaagaaggtctaatccccctgggggtttgtgaatgctgaggaatgatcctgatatttacgtttccacaagctgacttgggttgggagctcatctgttcccttgacttctctttttccagttcttcagcaaggccacaggtgctgcgggaaaatcagtaactaatgaacgagaattgtcaccacccagaaatcccaaatcctaacagtgccaaaatgtgctttaagccttttctcttcacaccagtgtcataactcagaagcctataggccaggcagacagcagcaatatgagaggctgctgagggagacagaagtgggaggaggatgagggaagtaccgtgtgtgctctgtctacagagggcagccactactcaagcttcagctggttatcatgctggggaaagtggacccagattgccatattttccaaattcaagaacagaagggaaaaaaatctgtgttttcacttgaaatttcctgatttgtaaatgctggcagcttttacatttaaaaaacactgatgattaacgctgatgatgaacatcactgattaactttctacaatccttcccatccatttataaaaacaaatgtgaagacaccaaggtctcgctctgatgcccatgctggagtgcagtggcacaatagtggcttactggtagggttttgagggagagtgaaattagatacatggcacaattacggctcactgcagcctcgacctcccaggctcaagtgatcctcctgcctttgcctcccaagtagctgggaccacaggtacataccaccatgcctggctaatttttttttttttttaattatttgcagagatggtctccctgtgttgcccagcctggaaaatgtatgttctaaaaatagtacagcaccgcgatgtcttcagcatgaagccactggaggcagcatggcaggctccagtcaccccagcactcaccagttcttacaggccttcctctttttcccttccccacaagaagcagcccgcagggaagctggatctggcttcttcaaatcttctggatccagcagctcatctgagtcaatgagatcctggagagtgttcaaagcaatgagtgatacagtcgtggtctctgctaatgaaaagctaaagtgactgcaggcttcgagaggaaacttggagtccagggtaaagaaggtgtccaccctgtcctccttttggttgatcatcatgttcaacctgaccacatgctcaagaggccaacggtgagttaaactacatccacagaagatgcactaggatgcaaaggaattagaaacaaatttacatgagaaaaagctgtatgactggccagcaatgtgtagagaatatacacatgttgggggttgggggcaggagtggggagaagggagggaacaggcagaacagagaaagagagaagtgtttatgaagagtcacgtgaaaaagggaataaaatatcttttacataatcccagataaaaatcaaataattatatatacctttatgtaattctttgtaaatgtgtagacacttagtctgtaaaccctatgagagcatgaacctcacttattttgctcactactctaacttcaatagtagaggtgtagaaatgaagaactttattacagacatggccaaagatagaaaatagtgctttttaaagcatggaacagtcagcaacttgcccaaaggtgccaataaaactatttaagctgacaaaatcttttcaggtttacacatgcccacaagagttttcaacatatcgtatgaagtgagaacaagaaattatgtggggaaaaagagatgctaaaaaatttaaaatgccaccaacatggccaagcgcagtggctcacacctgtaatcccagcactttgggaggccgaggcgggcagatcacttgaggtcaggagttttgcgaccagtctggccaacatggtgaaaccccgtctctgctaaaaacgcaaaaattggccaggtgtggtggcacatgcctgtaatcatagctacttgggaggctgaaacatgagaatcgcttgaacccgggagcagagattgcagtaagccgagattgtgccattgcactccagcttgggcaagagagcgagactgtctccaaaaaaaaagccaccaacatggagtttccttctaaatcaaagatgtgacaggcatagtcacaaatctgggctttaaatacgttcacacctacaagtccagaaaggtcactatagctgttcacacccaaactggggcctgaaagaaagcaatcaagtgacaatgctgccagctcaccatgctgtcgtcctccatatcgttggctgagagggtccacagcttggcagcagcagggtccacagcaggtttcactgagtccaagcaataaaagaaaaaactccataaacacagtcagaaactattaattacaaacatacgtaaatgctttctgctgtgtagaagagaacacactggcctgggaggcagaagatgtgggttcaaagtccagctctacccctctgagaggtctgaccttgggccaaccacttgctgatagttacagaagtcaccatttgctaagctcttgctttgcaccaggcaccatattaagcacttatatacattatctaacttaattctgctgacaaccttatgaggtaactatctgtcatcctacttttaccgctgaggaaacaggtttagacacttaggctggttccacaggctgcaaagcctgtctgatgcttttaacctccattccatattgcttcctcctcgataccttagtttccattctataacatgaagttaaattgtacttcctatgttactgcaggtgttttgaggattaaatgagaaatgtgtcaaaaccttcaaaaatagcagagctttagcctcatgtaaacctgctacatacaagaaaataggctctagagctgctggtggcaaggtaacaccatcagtggcagacaaacctcacacttcctggttctctgtctagtcaggagaatgcaaggaagaggcagagagctgaggctcggatgcagtgtgggcaaatcctcgcaggcccttggggtaagagtaccctctagtgatcattgtcacagctggatgctcataccttccacaaggccaactgttctaagctattcctacccattctggaaccatgaatcgaaaggttagattccaaaggatttcttgaagatttaggttagacagtcaaaaccgtacaagtgggaatgtaccagtaaatatctgttaatgtctgcatacctcacagctgggtcaattcaggcatttaaaaatagggataggaaggatgaggatggagctgtgtgtgtgtgtgtgtgtgtgtgtgcgtgcgcgtgcgtgcacgcgtgtgcttgtacacaattttctagtcagaagaaatatagttttataagtgtcttagcatcctcaaagtaagaacagctgattttcctggcatggggaaaaaagcacatgagaacaggaacagggcactctcatacaccattaccactacactgtgaggtcttctgaggagaaacgttaattctgggacctggaaggacctcattaattaaactgtgtgactcagtcctgtaaaattaggaggcctcggtatcttctggtgcagaagaaggagctgaactagataatacctatgtattatttcagttttggatcctaatatgcccatgataatagtacattaagtattcttctttgtggaaatggcagaaatcaaaggactaatcctctaaaaatatcaccatctcatttattgctggctcaatttctaacatgtccctctaagcccattcaaacagaagaatgtccctaggccagccttacctgaaggagaagacttcttggtgatggaaagcttaagctgcctagaagaacccacttcaaagtttggttttttgcctgtgatctgaacaaacagcaggttgtcactttcatgaccaaggtgttctcgaacagactgtacttcctcaggggttaggggctcccgctgcagctagaattcaagacatcaaaaggattagttcaccctcctctgtaaaatggtttactatgtctacctacacaggagtcaaagactcatttctgtgcattaaggatgtaacagtggatggtaacagataacactttatgcctcacattcagtttctcactgatcagaaccctagagtataacctttgtctgcatgtttacttggagcctaccccttggaaaatgtaaaagtacttaaaaaacattagggatgaggcatatactagttatttgggatgtaatacaattatgaaaatgaaccagatgtggtcctactgtgtaacaggaaagaatgcccacaatgaagacagcagaaatttatatcccaaaagaaaaagggggaggaaaatcctttctatgttccttgggataaagtagcagagagtaaaggtagaaaaaaagggtcagggtgccacctctatgtccaataattatagactggttacataaatcacagtccatctattgtatggaatactattacatcattaatatgaatgaagggaaatacactgaagtaggtaagtgtctatgatatctaagggtgggaaaaaaggtgattgaacaatgtatacttatgatcttatttacatttttaaaaaagtatgtgcatgtagatgcttgtaaatacataggaaaaggtctgaacggacatacaaaaaggcattggtggcttcctctggggagggaagtgtgagcaagaagtgggatgtcactttatattctgtatgctttggtgtaaagtgaatttttatgaggagtctgatatagtttggatatgtgtcccctctaaatctcatgttgaactgtaatccccaatgttggaggtggggcctggtgagaggtgactggatcatgggggcagatttctcatgaatggtttagcaccatctgaattctcatgagatgtggtggttgtaaagtatggcaccttccccaccccgactcttcctctctttcttgatcctgcttttgccatgtgatgtgcctgctcctgcttcaccttctgccacgagtaaaagttcattgaggcctccctagaagccaagcagttgcaggcccgtgcttcctgtacagtctgcagaacagtgagccaattaaacctcttgtctttataaattattcagtcttaggtattcctttataggaacagaagaatggcctaatacacattccttattttaaaatcaagcacagaaaaccttaagctaaaaggaaaaataagaaagggttggcataaagaatctaaggcctggcataaagaatctaaggcctggctcacgcctgtaataccagcactttggaaggccaaggtgggtagatcacctgaggtcaggagttagagaacagcctggccaacatagcgaaaccccatctgtactaaaaatacaaaaaattagccaggtgtggtggcgcacgcctgtaatcccagctactcgggaggctcaggcaggagaattgcttgaacccaggaggcggatgatgcagtaagcagagatcgtgtcactgcactccagcctgggcaacagagcgagactgtctccaaaaacaagaaaaaaaattaaaaaacaaagaatttaaggccctacattatgtaagaaataacaggcacaacagctatctatcatgctgtaacatttacctctcccacatccaagaaaattttaagatcaaagagtgtagaaatataaatacttctgcttaatttaaacatttccactgaattgtcagaaaaggaactttgccctctaacctattccagcctcccaccaaaaatgtgaggctgaactagatggcagtgttcacccaggcctaggattcgggtctactgagaggtgggtgttggaagcagcagagctgctgctcatgcccctcagctgtcaccaccactaaactagtaccaaggagacaagaacaagccccagcccacatgggccaagctgagtctctttgaagttggttattctcaaaagtttttttttgttttgttttgttttttttgagacagagtctcgctctgtcgcccaggctggagggcagtggcgtgatctcggctcactgcaagctccgcctctcaggttgacgccattttcctgcctcagtctcctgagtggctgggactacaggcgtctgccaccaggcccgactaatttttttgtatttttagtagagacggggtttcactgtgttagccaggatggtctcgatctcctgagctcgtgatccacccacctcggcctcccaaagtgctgggattacagacgtgagccaccacacccggccgattctcccaagttttgtcctttgaagcatcatgtatcttacatgcacagcatttcttgtttcctagttctaagcaatactgattacctcacctgcagggcagcaaagaaagttgtctacaaacgtacctctttcacttccacaagaccagaaagagtcagggctgaacacagcttagatgctgtcttcactttgctattgttatctgccaaaaggaaaatcccaattaatagctttatagttcaaagtaggaaaaataataaaggctcaatcctatatgggttcgcaggcattcaaacaataataaccaggtgggcgtggtggctcatgtctgtaatcccagcactttgggaggctgaggtggacagatcacttggggccaggagttcaagaccaatctggggccaacatagcaaaatcccgtctctactaaaaatacacacaaaaaaaatagccaggcgtggtggcacacgcctgtaatcccacctacttgggaagctaaggcacgagaatcgcttgaacctgggaggcggaggttgcagtgagccgagattgcaccactgcactcttgcctgcacaacagagtgagacttgatctcaaagaaaaaacaaaaaaaaaataataacctattctgtttaatgtacagatggtccttgacttaatgatggttctacctataatttttcaacttttatgatagtgtgaaagtaatactcattcagtagaaactgtatacttcagttttcagtaaattacatgagatactaagcactttattataaacaggctttgtgttagatgattctgcccaactgtaggctaacgcaagtgtcctaagcgtgtttaaggtaggctaggctaacctaagcaattgtgtttagtaggttagatgaattacatgcattttcatcttaatagtatttatcaggatgtaactccattgtaagatgaggacaattgtatatatattttagtgatattattttattattattattattattattatttttgagacagggtctcactttgtcacccaggctggagtgcggtggcatgatctcagctcattgcagcctcgacctcccaggttcaagcaatcttcctgcctcagcccccaccaagtagctggggttataggtgtgcactaccacactgggctaatttttgtattttttgtagagacggggtttcgccatgttgcccaggctggtctcgaactcctggactcaagcaacctgcctgccccagcctctcaaactgccgggattacaggtgtgagccactgtgcctggccatagcgatactattttaatttgacaaatcctttttgttgttcgaagtgtttttacctaagctcttaaatgttataattccattattattgtttttttatcactctctgcttcttgaaaccccttccagaggttgtgagataatgactatgaaaagaggcttatgaactgcaaagtgcacagaaacacaagtattccttctgaatagttccttttttatctctgtatagttctaagacactacatttagtcatgtaaggtttaaattcccagcaaagaatgctgatttatactacacataacacaaagttctatttccaaataaacaatgaacacctttatacatttcaaaatactttcatttctattattctatttgatgaaatggttatgttttgactgaaagtctagtgaaaaatattaaaaatccagacttgaatcactctgacagctataccaccgatcaaaaaagtttttacttcatgaacactgtcattagtttcacatgaatcaataattaccacatcattcccagggttcggccactatttttaaacttttaattttgaaataactatagattcacaggaagttggaaaaaacaaaaaaaagttctgtatattaaggaggtcttcacttcgtccctccccacagttaacatcttacccaattatagcatgatatgaagaccgggaaattgatattgatggtccacataactttttcagatttcatttcttttatatgtactcgtttggcagaagggggctatatagttctatgtaattttattatatgtgtagatttgtgtaaccaccacgacattcagaacacagaattgttctatcaccacaggaaccctcatactacccctttatagctccaccaaccctttcctcccacttctaacctctggcaaactctgatctccaccgccacaattttgttatttcgagcatatgaatggatttgtacagcacagagccttttgagattggcttttttcactcagctacttcccttgatatccatccaagctgatgtacatatagttagctagttcatttttattgctgcatcactttccatattatgaacatatcaaagtttattcacctgcaaaaggacccatttttagatggcagtttccttctattttattacataatgagtcagccaaagattacaatttctccagatatgttgcttcagattttaacaataatttatccccaaggaaaaggttttgctacaggaatactgatctcccaatgatacctcctgctcacggagatgcagcacacatactctaagactcaaccctgtcaaacatgttttccaagtgaagatctccttacctacagctgtctctactggctccttcagaaaaagacatccaccaggccgaaggatccgggcgatttcagccaaaatctcagcactgtgcagagtggtgcttcctgggactaaacctgacaaaataatgtcaaagctggattctttgtgggcagctgaaaagaagaggactctaattagcaatctcctgagcctgggataatctcctggtcccttccaacccccaacaaaagctacagacctcaccctgagagaatggacaccactcgatatccatccaagaagctggatgaatagtaagtgttttaaaaaaacatggaatagctaccaagaaagaacatacttatggaaatcatcaactacactcctaagctctgctgcaggaagtgagggaccccaaacggagggaccggctgaagccatggcaaaagtacacaaattgtgaagatttcatgaacatttattagttccccaaattaatacttttataatttcttacgcctgtctttactgcaatctctgaatataaattgtgaagatttcatggacatttatcacttcctcagtcaatactcttgtgatttcctacgcctgtctttactttaatctcttaatcccgtcatcttcataagctgaggatgtatgttgcctcagaaccctgtgatgattgcgttaactgcacaaattgttcataaagcatgtgcatttaaacaatacgacatctgcgcaccttgaaaaaagaacaggataacagcgatgttcagggaacaagggagataaccatcaggtctgactgcctgagagccaggcggaacagagccatatttctcttcttacaaaagtgaataggagaaatatcactgaattctttttctcagcaaggaacagccctgagaaagagaatgcgttcctagggggaggtctctaaaatggccactctgggatgtctgtcttatatggttgcagataagggatgaaataagccctggtctcccgtagcactcccaggcctgttaggacgaggaaattcccacccagtaaattttagtcagaccagctgtctgctttcaaaccctgtctcctgataagatgttatctatgacaatgcgtgcccgaaactttattagcaattttaatttcgccccagtcctgtgatctcgctctgcccccgtttgccttattttattgccttgtgaagcatgtgatctctgtgacccacaccctattcgtacactccctcccctttgaaaatcactaataaaaacttgctggttttgcggcttgaggggcatcacggaacccgccgacatgtgatgtctcccccggacacccagctttaaaatttctctcttttgtactctttccctttatttctcagaccagccgacacttagggaaaatagaaaagaacctacgttgaattattgggggtggttcctccgatatatctcaactgaaaaacaacagggtgaccagccaccactatcacatgccaccctaaatgaaaactcagatatcaaggaaccacagaaatgcaacactcccatggaaacccctccagcctcataaagacaacgtgggtgggtacttacattgcaacagctgcttgatgttttccacagacacgcggccctcattgccggttaacgcttgaagcttatccaccagacctttcagagcctccactggggatgacttatcccagaccactgccacaaactggccagcagagatcccaaaatctgccattcttgcagtgcagtactgacagacctaaaaactgctggccaaaagggaatcaagactgggcagagacaaagtgcaatttaatctgtgagatatcataaaatatgattagaatcccaacctaacttgtaaccgcccactagggaatgctgacaacattagaaactctactgtatatgctaaagagtctgaatacatgaaccccattatctcaagtcttcataagcccaacattcccaaagaaggcagatagcttccttggtgagaatcctgacttggaagagtcaagaaaggggattagaggcaagtaagaaggttggaggcagaaagatgatttcctctttgacctaagataattcagcatgaacggaatggaaaacacacaggacatcaattaggcaaagtgtgacttggcaaggaaggcaaataaattgacagaaataacccaaccacagattcaatgtttttaaaaagaaacaacacatttaaatttgcaaactgaatactggttattttccctttcatcaaaatatgaaaatttaattccactgaatctgcagtgatcaagaatacttactatgtctgtaccatttaatattagctacattgttcaaagcatcttctaaacattatctcaactgaatctcagaacagccttaaactagatattattaccattttacagtctggaaactgaggcaatttacgttgcccaagtcacacagctagtgagtgctacatggataaagtgagagctgggatttgaacccaaattcatctgactgtaaatcccatgcttttaacctatggaaatttccctccagggatcaacttcc

SEQ ID NO: 2246 - DNA, 555 bp, Homo sapiens
aattatagctgggcgtggtggctcatgcctattatcccagcaccttgggaaggcgaggcaggtggatcccttgagtccaggagttcaagaccagcctgggcgacgtggtgaaaccccatctctactaaaaatacaaaaattagctgggcatggtgacagaatctatggtagtcttatgtagtaatcttatgtagtcccagctactggggtggaggagagggcctgaggtggtaggactgcttgagcccaggaggttgaggctgcagtgagccaagattgtgccactacattccagaccctgtctcaaaaaaaccaaagttcacttcaagtaactctcctctttgcctacaaaacatactcaggatgttaaatatttaacactcaagcattaaatactatagcactttgatttgtcactcttttcctaaaggagttactaaaggttttatttgctagactgatgtcaattagccttctggatccacggcctccataatctggctctacctgtatctcccaccattccaaagtgatccctccttattctatgaaaac

SEQ ID NO: 2247 - DNA, 517 bp, Homo sapiens
aactacatgttacagtataaactggcactcaactgcctggctctccactctccaccccttttctttaaaaaaaaaaaaaaaagctacaggaagtgggattggcacgttttcttttcaataatttataactgtttttctaccttctaaggtcatggcgaatacgtaatagagtcttttaagggttacttgattcaaatatgtcttaagtaactgcttcctttacatttacagtgttctcgcagtctttgccttataaaactcatgcattcaatgaagagcggctgcaagagtgagctaatccttttgttcggcgaactttgaagtttttcgccttactgcacagcagtgatttgttaggtagcatgccctctctcacatcttttaaggttaggtgtaaagtttcccaaaaagcaccaagagagttaacttctaagggtgaaacgaaatccgattcagtacattacctactttttaaaacttcccccctacccagagctgcattagcacaaaagttagt

SEQ ID NO: 2248 - DNA, 1737 bp, Homo sapiens
  SITE (596): n equals a,t,g, or c
  SITE (749): n equals a,t,g, or c
  SITE (1185): n equals a,t,g, or c
  SITE (1188): n equals a,t,g, or c
  SITE (1622): n equals a,t,g, or c
cattccttagaacaaaacaaaaccaatgaaacgaaaccctcttatattttgtggttctttacgtcacaattctatattacactggtgtcaagaaaccagcagacagatgccagtagacaaatggtttcattgttatcccaaggccatgcacgccttaataaactttcttagacttttaactcttaattaatcaggtgctattctaaattagggcatttcaagggtttttactgtatcagaagaatatgaacatttatttttgctttcaaagaaaaagcaaaccctaaattctcctctccattcttaaaattcactaacacaacctgtcagaaatagactacacacctgaagtacagaagacacatagcctacaggtcttgtgtattttagagaactttggtgtttatattaccactcgcagcccctttctcagttggccttgaggcttgcccattagctggtaaacgtttgaaagggtcagtgtgtccagaactggaatttccactttggaaaaagcacagaggtacctgacatatgttcctggagggcctgcactataccttcagacctgcaaaattcctacttctgcttgatgngcaggcaggtcaaagttgtaaaacctccagtgggtactcctgcctgcagaatagaacacagtgtccaaagacccctggtttctgactcctagactagagagtgtccaaaacatgaatataactttaataatactcacgaaaatactaccttgngggaaaataaggaaagaagaatctaacactagaggccccagtctcgacccagaatttggcactgcttagacttaaatcatgttagggtggaaatagtttcttcctctttgatgaggatagtgaagccaaggagaagtgaagtgatttgtccatgctgactcagctgctgggatagcactcttactctaattatctacttcgtaggtattatctgccccctagatagtgagctccgtggggctagggggagacagcaatgtttcagtgcccacagtgctgggcaccacaggcccatactccaatttgtagcctgactggaattgcagataccacgttcccactttagtttatggaaattgcaccccacactgccagtttacattcaactacatgttacagtataaactggcactcaactgcctggctctccactctnccnaccccttttctttaaaaaaaaaaaaaaaagctacaggaagtgggattggcacgttttcttttcaataatttataactgtttttctaccttctaaggtcatggcgaatacgtaatagagtcttttaagggttacttgattcaaatatgtcttaagtaactgcttcctttacatttacagtgttctcgcagtctttgccttataaaactcatgcattcaatgaagagcggctgcaagagtgagctaatccttttgttcggcgaactttgaagtttttcgccttactgcacagcagtgatttgttaggtagcatgccctctctcacatcttttaaggttaggtgtaaagtttcccaaaaagcaccaagagagttaacttctaagggtgaaacgaaatccgattcagtacattacctactttttaaaacttccccccntacccagagctgcattagcacaaaagttagtcccgaagtggtaccaaagaaacatttcatgcatagagtttggtttggttacctgggtgggggaaacaatagcaggtgaaactat

SEQ ID NO: 2249 - DNA, 1796 bp, Homo sapiens
tatacagttttttggaactgatttattttactcaggtaaataaaagataatgactgaaagactgcattccttagaacaaaacaaaaccaatgaaacgaaaccctcttatattttgtggttctttacgtcacaattctatattacactggtgtcaagaaaccagcagacagatgccagtagacaaatggtttcattgttatcccaaggccatgcacgccttaataaactttcttagacttttaactcttaattaatcaggtgctattctaaattagggcatttcaagggtttttactgtatcagaagaatatgaacatttatttttgctttcaaagaaaaagcaaaccctaaattctcctctccattcttaaaattcactaacacaacctgtcagaaatagactacacacctgaagtacagaagacacatagcctacaggtcttgtgtattttagagaactttggtgtttatattaccactcgcagcccctttctcagttggccttgaggcttgcccattagctggtaaacgtttgaaagggtcagtgtgtccagaactggaatttccactttggaaaaagcacagaggtacctgacatatgttcctggagggcctgcactataccttcagacctgcaaaattcctacttctgcttgatggcaggcaggtcaaagttgtaaaacctccagtgggtactcctgcctgcagaatagaacacagtgtccaaagacccctggtttctgactcctagactagagagtgtccaaaacatgaatataactttaataatactcacgaaaatactaccttggggaaaataaggaaagaagaatctaacactagaggccccagtctcgacccagaatttggcactgcttagacttaaatcatgttagggtggaaatagtttcttcctctttgatgaggatagtgaagccaaggagaagtgaagtgatttgtccatgctgactcagctgctgggatagcactcttactctaattatctacttcgtaggtattatctgccccctagatagtgagctccgtggggctagggggagacagcaatgtttcagtgcccacagtgctgggcaccacaggcccatactccaatttgtagcctgactggaattgcagataccacgttcccactttagtttatggaaattgcaccccacactgccagtttacattcaactacatgttacagtataaactggcactcaactgcctggctctccactctccaccccttttctttaaaaaaaaaaaaaaaagctacaggaagtgggattggcacgttttcttttcaataatttataactgtttttctaccttctaaggtcatggcgaatacgtaatagagtcttttaagggttacttgattcaaatatgtcttaagtaactgcttcctttacatttacagtgttctcgcagtctttgccttataaaactcatgcattcaatgaagagcggctgcaagagtgagctaatccttttgttcggcgaactttgaagtttttcgccttactgcacagcagtgatttgttaggtagcatgccctctctcacatcttttaaggttaggtgtaaagtttcccaaaaagcaccaagagagttaacttctaagggtgaaacgaaatccgattcagtacattacctactttttaaaacttcccccctacccagagctgcattagcacaaaagttagtcccgaagtggtaccaaagaaacatttcatgcatagagtttggtttggttacctgggtgggggaaacaatagcaggtgaaactat

SEQ ID NO: 2250 - DNA, 869 bp, Homo sapiens
tcaccttttaactgtctttattttgatctagtttaaacagataaagaagccaaaattttgccaatgagactacttgccaggtggaaaacgattaatttatagactcctggtacaaaagccaaaacagtaggcgctcagtaactacttcctgaatgaagaaagttatatacttatgtacaaaacatttagtttctccaccaacttgaacttttcataaaggagagcaaacattcttgcagtagaaaaaggaatgtagccacaaactaatattgaaaatcagaaaaatacccactctttaaaaggcagttaatcttaatagctccaaataaccatggcaagaagtcttgttacaatcgctatactcctttcatgtttataaaaatttgattccatctataagaaataaagaacatccctccctcttagtcttcaaattcaaaataggaccttagcagttatttcaataatacataaaatgcatgcctttcactattaagtagatacattaaatattccttcttccttgcccctatagcacctgagtggattccctgagctgtcagcctctggcttctcctcaaaggtaagttaatgaacaactaactgtgtcagcctgcttgcagcctgctgcagtttccactctgctaactataaggaccaacggcccacactgaagacaataaaacacaaacaggggatgtgtaccagcccccaaaatctttccactaatagatgtcctctctacagaattccttaaaagtatttctggaaataatctaggttagggtcaagcaagtgcaactaaagacacctttgtcacagcttgcaaatgcttcacacttttgtttagcacaggagagagacatgtc

SEQ ID NO: 2251 - DNA, 1081 bp, Homo sapiens
ttggggaggatgtaagtgttccccagcgagggcggctgggggcggtggtggtgggagggatgggtgggggggtggtgggagtggtgccgtgccgccccgttcagagcctcggcgtagcagccctgcggggcgggcgagcccagcttggtgccaatgcccgcgatgctgttgagcgtggcgatggagacggcgccgatgcagtggttggtgtaggtcttggagagcttggccgccttggagagcatctgcatccgagtgcctagcaagttcttgccgatggctttgttctcgtaccaggtcacatcgccctcgctgcagtggtcccggggccgctggaagaacgccttgcagagagggttgcgtttcgacaggtacttgacgaagctggcgtaggggcagaactcggtgcccgtctcatacatgcggggcaagttctcctcgtcgctgctctcggcgcgcttcttgctccacgacgacgagcgcgacttgtggtagggcccgagggacttgaagtagacgaacttgcgaccgtcctcgtccatggccagcccaaaagagtcctcctccaactcacgctggttctcgcggccgcgggtacagaagtacatgcacgtctcgaaccagaccttgttgagcagcccgaagggcgtgttggtgctgaagacgctggaggtgtacagcttgcgcaggtcggcgcgcgtgatggcttgcttctgcaccaccggcccggcgccctgctcctcgagcttgcggatgaccgcggccagcgtcaggttggcgctgcgcagctcggggtccttggtgaggtcgagcgtgcggcagtacgggggctcattgaggtagcggttgagggagctgcggatgctgatgagcgacgacttgctgtagagctggccgcttttggagcgggcctcggcatagaaggagcgcagcacgcggcacagcgcccccttgtccatggtctcgaagtccgggctctgcgccttctcgctcaggtactcccggaagatgcgcacggcgtagcgggtggccagccgggtgttctcgctcagccgggcccgctcggggcgctgcagcacgt

SEQ ID NO: 2252 - DNA, 5557 bp, Homo sapiens; identical to SEQ ID NO: 1473

SEQ ID NO: 2253 - DNA, 375 bp, Homo sapiens
attaataataataaagattgagaggaaaacgtcacattttctgaatggttaattattatattagtgatagcagcctgagtcttaaaaattctcccttaaggacaagcatgtggctcacacttataatcctaacactttaggaggtcaaggcaggagaatcacttggctcagaagttctgagaccagcctaggcaacatagggaaacactgtctctacaaaaaaatttagctgggcatggtggcattctgtggtcacagctacttgggaggcttaggtgggaggattgcttgggccaggaggtcgaggctgcagtgacagcctaggtgacagcaaccctggtgtcacctggtgaaaaaaaggtgaccctgtctcaa

SEQ ID NO: 2254 - DNA, 410 bp, Homo sapiens
gagatcgcaccactgcactctagcctgggcgacagagcaaggctccatctcaaaaaaaaaaaaaagaattgaactttttcttgaggacaattggaagttattacagggtttttaaaagtcaacatggcagggcacagtggctcacacctctaacctcactgctttggaaggaagccaaggcaagaggatcacttgaggccgggagttcaagaccctcttgggaaaactagcaagaccctgtctatacaaaacaatttaaaaattagccaggtgtagaggcacttgcctatagtcctagctactggggaggctgaggcagaggatcatttgggctcaggagttccaggatgcagtgagctttgaaggcgccattttatgccaacctgcacagcagtgagaccctctcggtc

SEQ ID NO: 2255 - DNA, 159 bp, Homo sapiens
tttttttcttttttttgagacggagtctcactctgtcgcccaggctagagtgcagtggcgcaatctcggctcactgcaagctccacctcccgggttcacgccattctcctgcctcagcctcctgagtagctgggattacaggcatgcgccaccaccccc

SEQ ID NO: 2256 - DNA, 4346 bp, Homo sapiens
tttgctattggagaaagcaaacacagagctttcctggccttccaaagaagatagccaggaaaaaattaaactacctcctgaaagattcttccagaaaccagtgtctggcctatcagtggaacaggtgaagtcagaaacaatctcctcttctgtcaaaacagcccatttcccggcagaaggtgtggaacctgcattgggcaatgaaaaagaagcacacaggagcacacctccttttcctgaagagaagccattggaagaatcaaaaatggttcagtcaaaggttattgatgatgctgatgagggaaagaaaccatcacctgaagtaaaaatacccacacaaagaaaacccatctcctcaatccatgcaagagagcctcaatccccagagtcacctgaggtgacacaaaatccacctacacaaccaaaggtggctaagccggaccttcctgaggaaaagggaaagaaaggaatttcatctttcaaatcgtggatgtccagctgttttttggatcgagcactccagataacaaagttgctgaacaagaagacttagaaacacagccaagtccatccgtagaaaaagcagtgactgtgatagatcctgaaggtacaattcccaccaattttaatgtagctgagaaaccagctgatcattcattatcagaggtaaaacttaaaactgctgatgaacccagaggtactttagtaaaatctggtgacggtcaaaacgttaaagaaaaatccatgattttatcaaatgtagaagatttacaacagccaaaattcatttctgaggtgtctagggaagattatggaaaaaaagaaatctcaggcgattcagaggaaatgaacataaactcagtagttacttctgctgatggtgagaaccttgaaattcaatcttattcactaatcggtgagaaattggttatggaagaagccaaaactattgttcctcctcatgttactgatagtaaaagagtccagaagccagcaatcgctcctccatctaaatggaatatttctatttttaaggaagagccaagaagtgatcaaaaacaaaaatcactcctttcatttgatgtagtagataaggtgccacaacagccaaaatcagcttcctccaactttgcaagtaaaaatatcacaaaggaatcagagaaaccagagtcaattattttgccagtagaagaatcaaaaggcagtttaattgatttcagtgaagacagactcaagaaagaaatgcaaaatcctacttccttgaaaatttctgaagaggaaacaaaactcaggtctgttagtccaactgagaagaaagataatttggaaaacagatcatataccttggcagaaaagaaggtgctggcagaaaaacaaaactctgtggccccattagagcttagagatagtaatgaaatagggaagacacaaattacacttggatctagatctactgaactgaaagaatcaaaagccgatgctatgccacagcacttctatcaaaatgaagactacaatgaaagacccaaaatcattgttggttctgaaaaggagaaaggtgaagaaaaagaaaatcaggtatatgtgctttcagaaggaaagaagcagcaggaacatcagccttattctgtgaatgtagccgagtctatgagtagagaatcagatatctctttaggtcattctttggatgaaactcaatcattttcattagttaaagctacatcagttactgaaaaatcagaagccatgctcgcagaggctcacccagaaatcagagaagcaaaggcagtaggaacccaaccacatcctttagaagaaagtaaagttttggtggagaaaaccaagactttcctgccggtggctctttcttgtcgtgatgaaatagagaaccactctttatctcaggaaggaaatctagtattagaaaagtcaagcagagatatgccagatcacagtgaagaaaaagaacagttcagagagtcagagctatcgaaaggcggttcagtagatatcacaaaagaaactgtgaaacaaggatttcaagaaaaggcagtaggaacccaaccacgtcctttagaagaaagtaaagttttggtggagaaaactaagactttcctgccagtggttctttcttgtcatgatgaaatagagaaccactctttgtctcaggaaggaaatctagtgttagaaaagtcaagcagagatatgccagatcacagtgaagaaaaagaacagttcaaagagtcagagctatggaaaggtggttcagtagatatcacaaaagaaagtatgaaagaaggatttccatctaaagaatccgaaaggactttagctcgtccttttgatgaaactaagagctcagaaacaccgccatatttgctgtcacctgtaaaaccacaaactcttgcttcaggagcttctccagaaattaacgcagtgaagaaaaaagaaatgccacgatcagaattgactccagaaaggcatacagttcatactattcagacatctaaagatgacacatccgatgtgcctaaacaatctgttcttgtttcaaagcaccacttggaggctgcggaagatacccgtgtaaaggaaccactgtcttcagcaaaaagcaactatgctcaatttatatctaatacatcagcaagcaatgctgataaaatggtttctaataaagaaatgcccaaggaacctgaagacacatatgcaaaaggtgaagactttacagtgactagtaagccagccggactttcagaagatcagaagactgcctttagtatcatttctgaaggctgtgagatattgaatattcatgctccggcctttatttcttcaatcgatcaggaagaaagtgaacaaatgcaagataaattagaatatttggaagagaaagcctcatttaaaaccataccactccctgatgatagtgaaacagttgcttgtcataaaacattaaagagcaggttagaagatgaaaaagttaccccattgaaagaaaataaacaaaaggaaactcataagacaaaagaagagatatccacagattcagaaactgatttatcatttattcagcccacaattcccagtgaagaggattattttgaaaaatatactttgattgattataacatctccccagacccagaaaaacagaaagctccacagaaattaaatgttgaagagaaactctcaaaggaagttacagaagaaactatctctttcccagtaagttcagtggaaagtgcactagaacatgaatatgacttggtgaaattagatgaaagtttttatggaccagaaaagggccacaacatattatctcatccagagacccaaagccaaaactcagctgacaggaatgtttcaaaggacacaaagagagatgtggactcaaagtcaccggggatgcctttatttgaagcagaggaaggagttctatcacgaacccagatatttcctaccactattaaagtcattgatccagaatttctggaggagccacctgcacttgcatttttatataaggatctgtatgaagaagcagttggagagaaaaagaaggaagaggagacagcttctgaaggtgacagtgtgaattctgaggcatcatttcccagcagaaattctgacactgatgatggaacaggaatatattttgagaagtacatactcaaagatgacattctccatgacacatctctaactcaaaaggaccagggccaaggtctggaagaaaaacgagttggtaaggatgattcataccaaccgatagctgcagaaggggaaatttggggaaagtttggaactatttgcagggagaagagtctggaagaacagaaaggtgtttatggggaaggagaatcagtagaccatgtggagaccgttggtaacgtagcgatgcagaagaaagctcccatcacagaggacgtcagagtggctacccagaaaataagttatgcggttccatttgaagacacccatcatgttctggagcgtgcagatgaagcaggcagtcacggtaatgaagtcggaaatgcaagtccagaggtcaatctgaatgtcccagtacaagtgtccttcccggaggaagaatttgcatctggtgcaactcatgttcaagaaacatcactagaagaacctaaaatcctggtcccacctgagccaagtgaagagaggctccgtaatagccctgttcaggatgagtatgaatttacagaatccctgcataatgaagtggttcctcaagacatattatcagaagaactgtcttcagaatccacacctgaagatgtcttatctcaaggaaaggaatcctttgagcacatcagtgaaaatgaatttgc

SEQ ID NO: 2257 - DNA, 377 bp, Homo sapiens
ctgaagataaacaagatctgggtattaagcagttttcacttatgagagagaatttgcctttggaacaatcaaaatcatttatgacaaccaagcctgcggatgtcaaagaaacaaaaatggaagaattctttatttctccaaaggatgaaaactggatgttgggaaagccagaaaatgtggctagtcaacacgaacagagaatagcaggatctgtgcagctggattcctctagcagcaatgagctgaggccagggcagctcaaggctgctgtgtccagtaaggaccatacatgtgaagtgagaaagcaggtcctgccgcattctgctgaagaatctcatttgtcatcacaagaagcagtatctgctcttgatacttcc

SEQ ID NO: 2258 - DNA, 12149 bp, Homo sapiens
caggtctttttttttttttttttttttttgagacggagtcttgctctgtcgcccaggctggagtgcagtggcacgatcttggctcactgcaagctcctcctccctggttctcgccattctcctgcctcagcctccctagtagctgggactacaggcgcccaccaccacacccggctaattttttttgtattcttaatagagacggggtttttcaccgtgttaaccaggatggtctcgatctcctgaccttgtgatccacccgcctcggcctcccaaagtgctgggattacaggtgtgagccaccgcacccggccgaccaggctggtcttgaactcctgacctcaggtgatctgcccgccttggcttcccaaagtgctggaattacagttgtgatccactgtgcctggcctcctaccccaatttagcccacaggccccagcctagagtctcccattttcttttttttttcttttctttcttttttctttttctttcttttttttttttttttttgagacggtgtctcactctgtcacccaggctggagtgcaatggcatgatcttggctcactgcaacctccgcctcccgggttcaagcaattctcctgcctcagcctcctgagtagttgggagtacaggagctcgccaccacgcctggctagagtctcctattttcacatgtggttggtttcctccccgagtgcgagggtgtcattgttcccatttcacagatggggaaacaggcttggaaatgaagccacttgaccaagatagtcacagcagggtccagattccttgcaaatgagaatgaggatgtaagcactatgagatcaggcactttgctgggctcagtgcttttcaaaaaaaagtaattaggctgagcgcggtggctcacgcctgtaatcctagcactttgggacgctgaggcaggtggatcacgaggtcaggagatcaagaccatcctggctaacacggtgaaaccccgcctccactaaaaatacaaaataaattagccgggcgtggtggtgggcacctgtagtcccagctactcgggaggctgaggcaggagaatggcgtgaacctgggaggcagagcttgcagtgagctgagatcgtgccactgtactccagcctgggcgacagagcgagactccgtctcaaaaaaataataataataattaatttaggccgggtgcagtggcatgtgcctgtagttccagctactcaggaggctgagtcaggagaatcgcttgaacccgggaggcggaggttgcagtgagccgagatcacgccactgcactccagcctggcgacagagcaaaacaccgcctcaaaaaaaaaaaaaaaagaaattcattttctaaatagagacaaggtctcgctatgatgcccaggctggtgttgaactcctggtctcaagcgatcctcctgccttggcctcccaaagtgctgggattacaggcgtgagccattgcacccagccagggctcactgctttcttctcagtggctgcaacagacagtgcctgcacacagtaggtgctcaacaggtgcatggtgaatggcagttaaaccgaaagctcagattccttcccggtcacaggcacaaggctccactcctgggtgtcatctgcttcagacttaggcagtagctctgcccccacaagccgcgattctgcctgggtggcactctttgtgcgggtgggggcgcttctgctacaagttccaggccctgggtgacagttccagccccccgctctcctcccctgcctacggatgcataatcttgttcctcaaaatataccaaggaatcatgtctctctcctgagggagttgtcctcagtctagaagagaattctcacctggatctgaggtggaggtttggaactctccatttcaccctgccctactgggaccatccccttttctccctaggggacctggacaaaccgtccctggccccttccaagcacagccatgtttccagacccccagctctttcacgactcaggagtcctgatcctagctcagactttctcgggcacccaggagtctggatccctaacccattccctccagggctttggaaatttgagtccccaccccttgcaggacacaagcctcctccgtttaggacaccagtggctcaggcccccaaccacagcagcaaacccacgggggccctggagtgcaggcctcaagtccaactctccaaacactgagaagtcccaaccttggtccttaggggacctgggaattggggggcccaagcccctcccttcagctatgggggcagctgagccagaggtcaggctgtagtggggaggccagaaggggcggggacagccgggattgggaggggagaacagcagcgtgggcggctggcagaggcagggaaagaccagcagagaggaaagagaaactgggagagggaggaagggagaaagtgagaagggaaatcggaaagagaaaagggaggaaacggcagagccagagagaaagaggaagagactgagtgtgaaggagagaggacacaggggatgactgagagacagagagagagagagaatgagacagagacttaaggaagagaccctgtgagtctgacaataaaagatttggacagaaacagaaagattggagagagagagagagggagagaatgagtgagagagagactggaagagacagagatcagagggagacacagaaagtgagagtggggagagaggtagtgtaaaaggaagagagagagagagagaccgtaagagacgggagacaaagagacaaaaagtgtgagtgagcaggtgaggagagagattgagaactatgagagacagcagctaagagacaaaggaggcgggagactgcctaggtgccgcagcacccacaccgtcctcttgcccccccgtcactgggaccccagagctgggtaagttccctggctgggctgggaggggctctctgggttcacattcctggtgccgcagggcttggcttggggagttggcaggggtggtttgggggtgcgtgtgggagggcgggagacaggtagcctggggcagccggaaggaggcagggaatggggagtccctaagtacagagagggtcaaattcctggcctgagtgcagtgggcaggaataaagaagcccctattctctggcctgggctgcagacagctgccccctcccgcagctgccagggccgcctacctctcttggcaccactcttggtatgtggtcacgggccatggcctcccccagccccccaagtcccgaaacaacaggctctttctctgcagcctcctccgacctccaagcccctgaccccatctctgtctcacacccgtcactgcagagacacagcccctttctttctctcccccagcccttgatggaggggagccgacctcgcagcagcctgagcctggccagcagcgcctccaccatctcctcgctcagcagcctgagccccaaggtttgagcttcctggcggggatggggaggaaggtggggctctgggccgcccatccttctgtttccccaaggactctggttgttaaggacaaagatccttagcaacggggtctgccagacatagtaaggtcccaaattgcctacacgccgcagctaggaattcagaggcactcccagctctgtccccaccctttgtattttcctaattctaaaccagagtaacaacctcccttgaccccggttgctaagataaagccgctccccagccatgaggcccctcgagttctgagaagtagtggctgctcttgattagtgccagaacttgctgtcctatctctcgccatccaatctacccactaatgaaatcctataaggagagacccttctctgacaataagacccaaggggcctccagatacttgcatcccaaatcggcatcccagccaaaagcttagggagacactcatttctttttcctcctgccgttccacacatattgtttctcaagttcagagcccagagatctgatctcagccttggtcagtaccaccgcttccaaggaagggcatattgtcgggacctggctaaggatgcctgagatatctgtgggcatcaggagatgaggctccatccgggcaggatggagggatttgaggcttcctctccttgtacttggttgctaaggggtgtgaccgcagggcaccagggcatcctttgattcactggagactcagcgtgagagttccccctgattatggggccctcccagcccatagtcccagttcagatcccaaaggacctactacagctctggctctggtggccaagggcatctgcttcttggcagtggacgcttgatccccaaattgcttccctacagcctcttccttgcctctgaacacctccctctgcccatcaaaaaaagagtctcggcccggcgcagtggctcacgcctataatcccagcactttaagaggctgaggcgggtggatcacctgaggtcaggagttcaagagcagcctgactgacatggcgaaaccgcgtctctgctaaaaatacaaaaattagccaggcgtggtggcacgtgcctgcaatctcagctactcaggaggctgaggcaggagaatcacttgaacccgagaggcaggggttgcagtgagccaagatggtgccagtgtgctccagcctgggggacagagcgagactctgtctcaaaagaaaaagaaaaaaagagtctctcccagcctgggcaacaaagtgagacccccgtcccctacaaaaagtaaaaaaattagctgggcatggtgggacatgcctgtggtcccagctacatgggaggctgaggctggaggatcacctgagtccaggaggtaaaggctgcagtgtttaggctactgcactccaaagagcctgtcaaaaaaaaaagagtctcttaactctgcaataagaacacctcccaattctgatctccaacttcagcccccaccttgacccttttctttctttctttttttttttttctttgagacggagtctcactctgtctcccgggctggagtgcagtggtgcgatctcggctcactgcaagctcctcctcccgggttctcgccattctcctgcctcagcctcccgagtagctgggactacaggcgcccgccaccacgcccggctaattttttgtatttttagtagagacggggtttcaccgtgttagccaggatggtctcgatctcctgacctcgtgatccacccgtctcagcctccgaaagtgctgggattacaggtgtgagccactgcgcccggctggtccttgacccatttctcagggcagccaagcgagagcctacggttgcctgtgtccaccctcaccccctcccaggaccatcctaggctctccctgttcacttctgtccccttctctcctcagaagcccacccgggcagtaaacaaggtccacgcctttgggaagagaggcaatgcgctcaggagggatcccaaccttcccgtgcacatccgaggctggcttcataagcaggtggggtcagtaggagaaggaaaaggacactgaagtctgtgccccggctgtcctctgtctctctccttgcaagtccccaaataggctttctttttcttgctatcactgcccctccccttagtccgtcattgtttgtttgtttgtttatttatttatttttaagacagagtctctttctgtcgcccaggctggagggcagtggtatgatctcggctcaatgcaacctctggcctccagttcaagcaattctcgtgcctcagcctcccgagtagctgggcttacaggcatgcaccatcatgcctagctaatatttgtatttttagtagagatggggttttatcatgttggccagggtggtctgaaactcccgacctcaagtgatccacccgcctcggctccctaaaatgctgggattacaggcgtgagccaccgtgcctggcccattcattcattctttcttgactacttcttgaacacttacagtgttcccaatcccagggcacacaccatgcaaataacacaaaagtatttatattacattccagattgggtggagcatgggtggataataaattagtaaataaataaatggacttggtcatttcagatcgcaggatgggctatgaagaagtaacatagggtccaggttcagtggtgtaaccccagcattttgggaggccaagacgggaagatcgcttgagcttaggaattctagaccagcctgggcaacatgaagaaacctcatctcaacaacaaatacacacacacacaaaacctagctgagcgtggtggtgtgcgcctatagtcccagctactcgggaggctaaggcaggaggattgctgaagcccaggaggctgaggctgcagtgaactgtgttcatgtcactgcacaccagcctgggtgacagagtgagaccctgtctcaaaaacaaaaacaaaaaaacggaatatgatgtgcttgaacgtggctgagagaggagaacttcaatttgacatttggtcagggaaaattatctctgaagtgacatttgagctggctgagcatagtgggtcatgccggtaattcaaacgctttgggaggctgaggtgggcggatcacctgaggtcaggagttcaagaccagcctggtcaacatggcgaaaccctggctctactaaaaaatacaaaaattagccgggccagctcgggggtgcctgtaatcccaactacttgggaggctgagacaaggaaaatttgaatctgggaggtggaggttgcagtgagccgaggttgcgccattgcactccagcctggatgatggagtgagactccatgtcaaaaaaaaaaaaaagacctggaggcagatcgcatccaaaaggaaaaggtctgcagcaggcaaaaccttggtgtcaagtgaggccaggggaagaagccaggaggagcagcagagcagtggttctcaaagtgtggtcccagaccagcagcatcagcgtcatctggggacttgctagaaaggcaaatgatgaggtaccatcatagatttgccaaatcaggaactctggggatggggccccagaatctgtgttttaacacaccttcctggtgattcttatgcaccttcaaactcaaaactctctgcaaagcagtacatgggctgggcacgatggctgacgcctgtaatcccagcacttcgggaggtcgaggcaggtggatcacaaggtcaagagttcgagacaagcctggccaatatggtgaaaccccatctctactaaaaatacaaaaattaggctgggcgtggtggctcactcctgtaatctcagcactttgggaggccgaggtgggcggatcatgaggtcaggagatcgagaccatcctggctaacacggtgaacccccatctctactaaaaaatacaaaaaaaaaaaaattagccgggcgtggtggtggtcgcctgcagtcccagctacttgggaggctgaggtaggagaatggcgtgaacccaggaggtggagcttgcagcgagccaagatcatgccactgcactccagcctgggtgacagagcgaagactccgtctcaaaaaaaaaaaaaacaaaaaacctaaattagcctgcatggtggcaggcacctgtagtcccagctactcaggaggctgagccaggagaatcgcttgaacccgggaggcagagattgcagtcagccgagattgtgccactgcactccagcctgggtgacagagcgagactccatctcaaaacaaaacaaaacaaacaaacaaaaaacagtaagtgatggtaaggaatttgagactgaatttcaagtgttcttaattctctgttttgaaaaggggactcacgtgatctaacttataattttaaaagatcatgtgggcttctatgggaatgggttgaggagaagaggcacacgaggttggagatagttagtggagtagttcaggcagaggcgatgagtagttcaggcaggtggagacgctgcatttgggtcatggctcattgccaccttcctggcctctctgtgtctcaggctccagaataattggactaagtctctgcagctaaagtctgcccatatgtggtccatgtctcatccaaacctccctaaaacttctcaatctccagcggatagacgagaaaacatgaaggtggattctaggcggaaatgacttgttccagagcatagtttgaaagtgggggctgggtgcggtggctcacgcctgtaatcccagcactttgggaggccgaggcaggcagatcacaaggtcaggagatcgagaccatcctggctaacacggtgaaaccccgtctctactaaaaatacaaaaacaaaattagccgggtgtggtggcggggggcctgtagtcccagctactcgggaggctggggcaggagaatggcgtgaacccgggaggcggagcttgcagtgagctgagatcgtgccactgcactccagcctgggcaacagagcgagagtccatctcaaaaaacaaaaaaagaaagtgggggaggccagacgcagtggctcacgcctgtaaccccagcactttgggaggccgaggtgggtagatcatttgaggtcaggagttcaagaccagcctggccaacatagtgaaaccctgtctctactaaaaatacaaaaattagctgggtgtggtggtgcgtgcctgtaatcccagctactcgggaggctgaggcaggagaatcatttgaacctgggaggcagaggttgccgtgagccgagatcatgccactgctctccagcttaagctacagagcaagactctgtcaaaaaaaaaaaaaaaaagagagagaaaagaaaagaagtagggctactattctattctatcatgttcagagggcttccagctctccttcttatccactccattgccccaaacatgtgtctctgtctcttctgtctctctgggtctttctcctgtgcctccaccccactcccaggctcaagtgatcctccctcctcagcctccggagtagctggggctacaggcacgcgccaccacacctggctaatttttttttttagtagtagagatggggtttcgccatgttacccaagctggtctcaaactcctggaattgagtgatccacctgccttggcctctctaagtgctgggattacaggcgtgagccattgtgctcggcctcaccccactctcttgatccctactttatgtctctgttctcctctctccaagtttctttctctctctggctctctgtccccatcgtcactgccttcatcccctttttctgtttccctttactcaggcccctcctcccatctctctccccaggacagctcggggctccgtctctggaaacgccgctggttcgtcctctccggccattgcctcttttattacaagggtcagtggctggctggctggcttggggtgggagggcccccccgcccagtctgcccttctctctagcatcttggccttctgatccctgtgtgatccttgaccccagcccctctttgcagacagccgcgaggagagtgtcctaggcagcgtcctgctccccagctacaatattagaccagatgggccgggagccccccgagggcggcgcttcaccttcaccgtgagtccatccatccatgttgtgcaccaggcaatgggaactggagatgagggcgggtagatatctgtcgaggaaactccaagtcctaacaagcactggaatatccattactggagataaaaggtcttgacaagcgtcaattgcatcctcgttttgttttgttttggtttgtttttttgttttgttgttttttgagacagagtctcactctgtcacccaggctggagtgcagtggtgcgatctcggctcactgcaacctccgcctcctgggttcaacggattctcctgcctcagcctctggagtagctgggattacaggcgcacgccaccacgcctggctaattttttgtatttttagtagagatggggtttcgccatgttggccaggctggtctcaaactcctggcctcaggtgatccgcctacctcagcctcccaaagtgctgggattacaggcatgagccaccgcgtctgtccagtcctttcctttcctttcctttccattttcctttcctttcctttcctttttcctttcctttcctttttttctctctctctctctttctttctttctctttctctctttctttctctcccttcccttccctctttccctctttcctttctttcttgacggtcttgctctgtcacccaggctggcgtgcagcgacgcaaagtgcagtcttcctgcctcagtctccctggtagctgggactacaggtgcgctccaccacgtccggctaattttttgatttttttgtagagacgggggcggaaggaggtggaggggggtgtctcattatgttgcctaggctggtctcaagccatcctcccgcatcggcctcccaaagcactgggtttactggaatgagtcaccggtccggcctgtcctcctttttacaaggcccgggagtccggattccaagccttctcttcccgcaggcagagcacccgggcatgaggacctacgttttggccgctgacaccttagaagacctgcggggctggctacgggcgctgggccgggcctcccgtgcggagggggacgactagtgagtagaggtccaagccatgctcctgaccctccaccctgagtcagtctcgtcatcccaactcctcccctttgagccctgcccccttgagtgtccaatcaccagtcttctagctaaggcgcctcgtcttctaggccccacctccagggaacttttccaatcagcaaaagtctttctcccttaagttccgcccaccaccttgtccgtccccgcccccaagctgacccttcagtcacgcactcagctctgctccaggaatgatcaatattgcacactctctgattggctccttctgaagtcccctgagctgccacctaaacaatgccaggtaaaagatagtatcagattttaaaaaaatgtcagactatctcttaggctctgacatggcctgcgccaattatcaggctggaaactggactacctggctgagtctatcccatattccggggcattgggtccagcaacctggatagacgttgtggcctggcgcacaggtcagtttcacattggaggcctcagtttccccttctgaagaagggggacgatgatttatagtgcacaactttccttttttgggtgcatccttgtgttctcacctgtgacaagagaatagggctgttatgaagttcgaaggagtgatatcttgtctatgtccactcgctagtgggcaacccaggtcacctgcacgaccccagcccggggagcgcccgggcggcccggtggtcccccggaggtgagcagaggggaagaggggcgcatctcagaatcaccggaagtgactcgactctccagaggtcgtggtagacccaggctgctcactcccagccccacaaccgacctccactctggactccagatgcggagggcgaggagcccgagtgagtagggaggacatggttgtgggcgtggcctaagagaagggcagggccggaaactggttgggggcgggccttagcgctttctgcttgagtgtgtgtgacttgctggggctcccgtgggggtcacagcctgtcggggagaagactggaggggaagatgccacaaagcggacattactgaggatttggacagtagaggaggattctaacccagtgggacagtaagacacagtgaagtgagacatgtccttgaggctgacttgatgggtaaggaggtggatggagagggctctagttgactcagttccccgattctctccttcccacagcctgttcacccccctctctcgccctccctcgcctctgagcctcccccgtccccgttctgcccctgcgcggcgaccccctgccccctcaggagacacagcaccccctgcccgacctcacaccccgttgagtcgcattgatgtccgacctcctctggattggggcccccaacgccagaccctctcccgaccccctactccccgccgaggacctccctctgaggctgggggaggaaagccccccaggagtccccagcactggagtcaggagcccagaacaca

SEQ ID NO: 2259 - DNA, 9745 bp, Homo sapiens
gagaaactgggagagggaggaagggagaaagtgagaagggaaatcggaaagagaaaagggaggaaacggcagagccagagagaaagaggaagagactgagtgtgaaggagagaggacacaggggatgactgagagacagagagagagagagagagagaatgagacagagacttaaggaagagaccctgtgagtctgacaataaaagatttggacagaaacagaaagattggagagagagagagagggagagaatgagtgagagagagactggaagagacagagatcagagggagacacagaaagtgagagtggggagagaggtagtgtaaaaggaagagagagagagagagaccgtaagagacaggagacaaagagacaaaaagtgtgagtgagcaggtgaggagagagattgagaactatgagagacagcagctaagagacaaaggaggcgggagactgcctaggtgccgcagcacccacaccgtcctcttgcccccccgtcactgggaccccagagctgggtaagttccctggctgggctgggaggggctctctgggttcacattcctggtgccgcagggcttggcttggggagttggcaggggtggtttgggggtgcatgtgggagggcgggagacaggtagcctggggcagccggaaggaggcagggaatggggagtccctaagcacagagagggtcaaattcctggcctgagtgcagtgggcaggaataaagaagcccctattctctggcctgggctgcagacagctgccccctcccgcagctgccagggccgcctacctctcttggcaccactcttggtatgtggtcacgggccatggcctcccccagccccccaagtcccgaaacaacaggctctttctctgcagcctcctccgacctccaagcccctgaccccatctctgtctcacacccgtcactgcagagacacagcccctttctttctctcccccagcccttgatggaggggagccgacctcgcagcagcctgagcctggccagcagcgcctccaccatctcctcgctcagcagcctgagccccaaggtttgagcttcctggcggggatggggaggaaggtggggctctgggccgcccatccttctgtttccccaaggactctggttgttaaggacaaagatccttagcaacggggtctgccagacatagtaaggtcccaaattgcctacacaccgcagctaggaattcagaggcactcccagctctgtccccaccctttgtattttcctaattctaaaccagagtaacaacctcccttgaccctggttgctaagataaagccgctccccagccatgaggcccctcgagttctgagaagtagtggctgctcttgattagtgccagaacttgctgtcctatctctcgccatccaatctacccactaatgaaatcctataaggagagacccttctctgacaataagacccaaggggcctccagatacttgcatcccaaatcggcatcccagccaaaagcttagggagacactcatttctttttcctcctgccgttccacacatattgtttctcaagttcagagcccagagatctgatctcagccttggtcagtaccaccgcttccaaggaagggcatattgtcgggacctggctaaggatgcctgagatatctgtgggcatcaggagatgaggctccatccgggcaggatggagggatttgaggcttcctctccttgtacttggttgctaaggggtgtgaccgcagggcaccagggcatcctttgattcactggagactcagcgtgagagttccccctgattatggggccctcccagcccatagtcccagttcagatcccaaaggacctactacagctctggctctggtggccaagggcatctgcttcttggcagtggatgcttgatccccaaattgcttccctacagcctcttccttgcctctgaacacctccctctgcccatcaaaaaaagagtctcggcccggcgcagtggctcacgcctataatcccagcactttaagaggctgaggcgggtggatcacctgaggtcaggagttcaagagcagcctgactgacatggcgaaaccgcgtctctgctaaaaatacaaaaattagccaggcgtggtggcacgtgcctgcaatctcagctactcaggaggctgaggcaggagaatcacttgaacccgagaggcaggggttgcagtgagccaagatggtgccagtgtgctccagcctgggggacagagcgagactctgtctcaaaagaaaaagaaaaaaagagtctctcccagcctgggcaacaaagtgagacccccgtcccctacaaaaagtaaaaaaattagctgggcatggtgggacatgcctgtggtcccagctacatgggaggctgaggctggaggatcacctgagtccaggaggtaaaggctgcagtgtttaggctactgcactccaaagagcctgtcaaaaaaaaaagagtctcttaactctgcaataagaacacctcccaattctgatctccaacttcagcccccaccttgacccttttctttctttctttttttttttttctttgagacggagtctcactctgtctcccgggctggagtgcagtggtgcgatctcggctcactgcaagctcctcctcccgggttctcgccattctcctgcctcagcctcccgagtagctgggactacaggcgcccgccaccacgcccggctaattttttgtatttttagtagagacggggtttcaccgtgttagccaggatggtctcgatctcctgacctcgtgatccacccgtctcagcctccgaaagtgctgggattacaggtgtgagccactgcgcccggctggtccttgacccatttctcagggcagccaagcgagagcctacggttgcctgtgtccaccctcaccccctcccaggaccatcctaggctctccctgttcacttctgtccccttctctcctcagaagcccacccgggcagtaaacaagatccacgcctttgggaagagaggcaatgcgctcaggagggatcccaaccttcccgtgcacatccgaggctggcttcataagcaggtggggtcagtaggagaaggaaaaggacactgaagtctgtgccccggctgtcctctgtctctctccttgcaagtccccaaataggctttctttttcttgctatcactgcccctccccttagtccgtcattgtttgtttgtttgtttatttatttatttttaagacagagtctctttctgtcgcccaggctggagggcagtggtatgatctcggctcaatgcaacctctggcctccagttcaagcaattctcgtgcctcagcctcccgagtagctgggcttacaggcatgcaccatcatgcctagctaatatttgtatttttagtagagatggggttttatcatgttggccagggcggtctgaaactcccgacctcaagtgatccacccgcctcggctccctaaaatgctgggattacaggcgtgagccaccgtgcctggcccattcattcattctttcttgactacttcttgaacacttacagtgttcccaatcccagggcacacaccatgcaaataacacaaaagtatttatattacattccagattgggtggagcatgggtggataataaattagtaaataaataaatggacttggtcatttcagatcgcaggatgggctatgaagaagtaacatagggtccaggttcagtggtgtaaccccagcattttgggaggccaagacgggaagatcgcttgagcttaggaattctagaccagcctgggcaacatgaagaaacctcatctcaacaacaaatacacacacacacaaaacctagctgagcgtggtggtgtgcgcctatagtcccagctactcgggaggctaaggcaggaggattgctgaagcccaggaggctgaggctgcagtgaactgtgttcatgtcactgcacaccagcctgggtgacagagtgagaccctgtctcaaaaacaaaaacaaaaaaacggaatatgatgtgcttgaacgtggctgagagaggagaacttcaatttgacatttggtcagggaaaattatctctgaggtgacatttgagctggctgagcatagtgggtcatgccggtaattcaaacgctttgggaggctgaggcgggcggatcacctgaggtcaggagttcaagaccagcctggtcaacatggcgaaaccctggctctactaaaaaatacaaaaattagccgggccagcttgggggtgcctgtaatcccaactacttgggaggctgagacaaggaaaatttgaatctgggaggtggaggttgcagtgagccgaggttgcgccattgcactccagcctggatgatggagtgagactccatgtcaaaaaaaaaaaaaagacctggaggcagatcgcatccaaaaggaaaaggtctgcagcaggcaaaaccttggtgtcaagtgaggccaggggaagaagccaggaggagcagcagagcagtggttctcaaagtgtggtcccagaccagcagcatcagcgtcatctggggacttgctagaaaggcaaatgatgaggtaccatcatagatttgccaaatcaggaactctggggatggggccccagaatctgtgttttaacacaccttcctggtgattcttatgcaccttcaaactcaaaactctctgcaaagcagtacatgggctgggcacgatggctgacgcctgtaatcccagcacttcgggaggtcgaggcaggtggatcacaaggtcaagagttcgagacaagcctggccaatatggtgaaaccccatctctactaaaaatacaaaaattaggctgggcgtggtggctcactcctgtaatctcagcactttgggaggccaaggtgggcggatcatgaggtcaggagatcgagaccatcctggctaacacggtgaacccccatctctactaaaaaatacaaaaaaaaaaaaattagccgggcgtggtggtggtcgcctgcagtcccagctacttgggaggctgaggtaggagaatggcgtgaacccaggaggtggagcttgcagcgagccaagatcatgccactgcactccagcctgggtgacagagcgaagactccgtctcaaaaaaaaaaaaaaacaaaaaacctaaattagcctgcatggtggcaggcacctgtagtcccagctactcaggaggctgagccaggagaatcgcttgaacccgggaggcagagattgcagtcagccgagattgtgccactgcactccagcctgggtgacagagcgagactccatctcaaaacaaaacaaaacaaacaaacaaaaaacagtaagtgatggtaaggaatttgagactgaatttcaagtgttcttaattctctgttttgaaaaggggactcacgtgatctaacttataattttaaaagatcatgtgggcttctatgggaatgggttgaggagaagaggcacacgaggttggagatagttagtggagtagttcaggcagaggcgatgagtagttcaggcaggtggagacgctgcatttgggtcatggctcattgccaccttcctggcctctctgtgtctcaggctccagaataattggactaagtctctgcagctaaagtctgcccatatgtggtccatgtctcatccaaacctccctaaaacttctcaatctccagcggatagacgagaaaacatgaaggtggattctaggcggaaatgacttgttccagagcatagtttgaaagtgggggctgggtgcggtggctcacgcctgtaatcccagcactttgggaggccgaggcaggcagatcacaaggtcaggagatcgagaccatcctggctaacacggtgaaaccccgtctctactaaaaatacaaaaacaaaattagccgggtgtggtggcggggggcctgtagtcccagctactcgggaggctggggcaggagaatggcgtgaacccgggaggcggagcttgcagtgagctgagatcgtgccactgcactccagcctgggcaacagagcgagagtccatctcaaaaaacaaaaaaagaaagtgggggaggccagacgcagtggctcacgcctgtaaccccagcactttgggaggccgaggtgggtagatcatttgaggtcaggagttcaagaccagcctggccaacatagtgaaaccctgtctctactaaaaatacaaaaattagctgggtgtggtggtgcgtgcctgtaatcccagttactcgggaggctgaggcaggagaatcatttgaacctgggaggcagaggttgccgtgagccgagatcatgccactgctctccagcttaagctacagagcaagactctgtcaaaaaaaaaaaaaaaagagagagaaaagaaaagaagtagggctactattctattctatcatgttcagagggcttccagctctccttcttatccagctccattgccccaaacatgtgtctctgtctcttctgtctctctgggtctttctcctgtgcctccaccccactcccaggctcaagtgatcctccctcctcagcctccggagtagctggggctacaggcacgcgccaccacacctggctaatttttttttttagtagtagagatggggtttcgccatgttacccaagctggtctcaaactcctggaattgagtgatccacctgccttggcctctctaagtgctgggattacaggcgtgagccattgtgctcggcctcaccccactctcttgatccctactttatgtctctgttctcctctctccaagtttctttctctctctggctctctgtccccatcgtcactgccttcatcccctttttctgtttccctttactcaggcccctcctcccatctctctccccaggacagctcggggctccgtctctggaaacgccgctggttcgtcctctccggccattgcctcttttattacaagggtcagtggctggctggctggcttggggtgggagggcccccccgcccagtctgcccttctctctagcatcttggccttctgatccctgtgtgatccttgaccccagcccctctttgcagacagccgcgaggagagtgtcctaggcagcgtcctgctccccagctacaatattagaccagatgggccgggagccccccgagggcggcgcttcaccttcaccgtgagtccatccatccatgttgtgcaccaggcgatgggaactggagatgagggcgggtagatatctgtcgaggaaactccaagtcctaacaagcactggaatatccattactggagataaaaggtcttgacaagcgtcaattgcatcctcgttttgttttgttttggtttgtttttttgttttgttgttttttgagacagagtctctctctgtcacccaggctggagtgcagtggtgcgatctcggctcactgcaacctccgcctcctgggttcaacggattctcctgcctcagcctctggagtagctgggattacaggcgcacgccaccacgcctggctaattttttgtatttttagtagagatggggtttcgccatgttggccaggctggtctcaaactcctggcctcaggtgatccgcctacctcagcctcccaaagtgctgggattacaggcatgagccaccgcgtctgtccagtcctttcctttcctttcctttccattttcctttcctttcctttcctttttcctttcctttcctttttttttctctctctctctttctttctttctctttctctctttctttctctcccttcccttccctctttccctctttcctttctttcttgacggtcttgctctgtcacccaggctggcgtgcagcgacgcaaagtgcagtcttcctgcctcagtctccccggtagctgggactacaggtgcgctccaccacgtccggctaattttttgatttttttgtagagacgggggcggaaggaggtggaggggggtgtctcattatgttgcctaggctggtctcaagccatcctcccgcatcggcctcccaaagcactgggtttactggaatgagtcaccggtccggcctgtcctcctttttacaaggcccgggagtccggattccaagccttctcttcccgcaggcagagcacccgggcatgaggacctacgttttggccgctgacaccttagaagacctgcggggctggctacgggcgctgggccgggcctcccgtgcggagggggacgactagtgagtagaggtccaagccatgctcctgaccctccaccctgagtcagtctcgtcatcccaactcctcccctttggggccctgcccccttgagtgtccaatcaccagtcttctagctaaggcgcctcgtcttctaggccccacctccagggaacttttccaatcagcaaaagtctttctcccttaagttccgcccaccaccttgtccgtccccgcccccaagctgacccttcagtcacgcactcagctctgctccaggaatgatcaatattgcacactctctgattggctccttctgaagtcccctgagctgccacctaaacaatgccaggtaaaagatagtatcagattttaaaaaaatgtcagactatctcttaggctctgacatggcctgcgccaattatcaggctggaaactggactacctggctgagtctatcccatattccggggcattgggtccagcaacctggatagacgttgtggcctggcgcacaggtcagtttcacattggaggcctcagtttccccttctgaagaagggggacgatgatttatagtgcacaactttccttttttgggtgcatccttgtgttctcacctgtgacaagagaatagggctgttatgaagttcgaaggagtgatatcttgtctatgtccactcgctagtgggcaacccaggtcacctgcacgaccccagcccggggagggccccggcggccccggtggtcccccggaggtgagcagaggggaagaggggcgcatctcagaatcaccggaagtgactcgactctccagaggtcgtggtagacccaggctgctcactcccagccccacaaccgacctccactctggactccagatgcggagggcgaggagccccgagtgagtagggaggacatggttgtgggcgtggcctaagagaagggcagggccggaaactggttgggggcgggccttagcgctttctgcttgagtgtgtgtgacttgctggggctcccgtgggggtcacagcctgtcggggagaagactggaggggaagatgccacaaagcggacattactgaggatttggacagtagaggaggattctaacccagtgggacagtaagacacagtgaagtgagacatgtccttgaggctgacttgatgggtaaggaggtggatggagagggctctagttgactcagttccccgattctctccttcccacagcctgttcacccccctctctcgccctccctcgcctctgagcctcccccgtccccgttctgcccctgcgcggcgaccccctgccccctcaggagacacagcaccccctgcccgacctcacaccccgttgagtcgcattgatgtccgacctcctctggattggggcccccaacgccagaccctctcccgaccccctactccccgccgaggacctccctctgaggctgggggaggaaagccccccaggagtccccagcactggagtcaggagcccagaacaca

SEQ ID NO: 2260 - DNA, 1145 bp, Homo sapiens
ctttttttttttttttttttttttttttttttttttttgagactgaggtcttgctctgtcgccaaggttagagggcagtggcacgatctcggctcactacaacctctgtctcccgggttcaagcgattctcctgcctcagcctcccgagtaactaggattacaggcacctgccaccacgtccggctgatttttatatttttggtagagatgaggtttcaccatgttgaccaagctggtctcgaactcctgaccagctgacaggtgatctgcccatctcagcctcccaaagtgctgggattacaggcgtgagccaccgcgcctggcccagccattgctctttaagcatcatggggattgtagtcctggatactctgtgccaagacagtgcggtgagaggtttgcatctcccttgtgtccccagttcaccttgcaagttggttgcctgctgttttgtctgagcatcatgggacggtagctcagaatatccacagctgactgcaagtctgagaatgagagtagcaaattccatcatcttgtggggctgttttgccaggctggtgcatttattatcaccctctgtgtccccacagtggcacacagctggagagcaggtagttgaggaagttgagagggcccagttctgaacctcaaaatatctcctaaagcacttcaattatggacatgcccactctactatttgtcactaagacatgccagtttctttttttttttaattattattattatttttttattgatcattcttgggtgtttctcgcagagggggatttggcagggtcataggacaatagtggagggaaggtcagcagataaacaagtgaacaaaggtctctggttttcctaggcagaggaccctgcggccttccgcagtgtttgtgtccctgggtacttgagattagggagtggtgatgactcttaacgagcatgctgccttcaagcatctgtttaacaaagcacatcttgcactgcccttaatccatttaaccctgagtggacacagcacatgtttcagagagcacagggttgggggtaaggtcatagatcaacaggatcccaaggcagaagaatttttcttagtacagaacaaaatgaaaagtctcccagacatgccagtttctaaaca

SEQ ID NO: 2261 - DNA, 291 bp, Homo sapiens
gcgcggtggctcacgcctgtaatcctagcactttgggacgctgaggcaggtggatcatgaggtcaggagatcaagaccatcctggctaacacggtgaaaccccgcctccactaaaaatacaaaataaattagccgggcgtggtggtgggcacctgtagtcccagctactcgggaggctgaggcaggagaatggcgtgaacctgggaggcagagcttgcagtgagctgagatcgtgccactgtactccagcctgggcgacagagcgagactccgtctcaaaaaaataataat

SEQ ID NO: 2262 - DNA, 477 bp, Homo sapiens
acctgagatgttgaaccagaagagtccgggtctgccctctacgctgatgacccccaccatgtggttcacagggtccgtctccatgaccgtaaagctgtagtaggtctcatcaaaggccagagggatggaggacggccggggccaagggatccactcaatgtgtagccggacactggctgagagtggtggctgcccactgtctgttgccttgatctgaaaggaggccaacaccaaaactgaggtttggggccaagagacaggaagacccaagcagccaggacaggaaccagagcgtcctgtgattctgaccaagcaggcctctcatccagtcattcattcatctgatgcatacttgaaggcttgctgtaaacaggcaccctgccagttgctgcaggcacggtggtgaacaaaacgtataacctgtgctcaagaacctcatggttagtataaaaataataaatgccactgttaactgaa

SEQ ID NO: 2263 - DNA, 477 bp, Homo sapiens; identical to SEQ ID NO: 2262

SEQ ID NO: 2264 - DNA, 1319 bp, Homo sapiens
atttgagggaagtaacctcaaaattacaaaagctatattaaatattacaaaaatccagaataattgaaattatcaaggattagaaactgatagaaacacttctgcaataactaactgtaattacaattagttgtaataactaattggtaataattggtagtaagtaataaataattggtagtaataaataataagtaatacataattggtagtaagcagcattcttagatgcatagttacagcattaatttcattattgggaagaagcaaacaagctaaactttgtagtctcacaagcagaaaacataagcagtaaataaatgaagttatcactcttgtggcaacaatgaagaaccaatgatacatactttgacaacaaaaagttcttttttaactctaaaaggaatgacatgtggaagcaactgagtagaaaatttcagcaaaatgagctgtatacatcacagattcaaatgaaaaaaatatagatctgtacacaagaatgacatctatgcctggcaagaatgcagagatgggagttcagatcaaggctacttcaactctacttcctaattctttcttctaaaattcttggttaaaatagttaaagcatggaaagcatccttagtgacgactgagtcttacaggtccattccttgctggtgagaaaaagattcacgtctatatttagtaaagtatactaagatcacttatcataattgtagtaataccatgcactaaaaaaatacccacgtgaaagacttcctgtttcatgcgggaaaggttatactagagaagggaaataatttaagaatacatttcacaattttactatattttgcctttatagcaagaatttagaactcagtgatatttttaaaaaagtaatctttttcattaaaaagttctgtaatgctatatatataattttaatactgtttttcttccatcttttacaaaacacagatagtaattccatgtaaaaatcttacagaattattctgttatttaacagtttcagtaattcaaacatttcatgaacatacctattaaacatcaggtgctatgcttaagtaactggcctacaaggatgagtaagacaatctctgacctcaaggaactcatgttttgagcataatttaaacagtgcaagactatttttataccataatgtataaaacaagtttgttaatatttcagtattacaaattggtactgtcatatacaggactcagtaatacaacccaaacacctaaaacagtgtctagtacataacggacataaaataaatgtttttaatgaattaattcactactcattta

SEQ ID NO: 2265 - DNA, 403 bp, Homo sapiens
ctttgccttatttcctcaacccctggtcctaatttgttaacattaacactggccctttattcctccttgattccatttaggtcacatgttggatttgatcacacagaatcctaccacctccaggatcttaaactcttaaagtttcacccttgaaccacaattttcacatttccattcccttatttctcagcaccacctccagcccctcccagggccactcctttaccctgtctgtctctttccctctcaatacatcaatacctctcctgtgttaaccttaaaggaaacgtcctatacctgctatgtctacttcctcctcacttctcagaatctttcaacatttgtgccaagccccaagcctcccttccacttggtctgtaaaaggaaagttttcataattcct

SEQ ID NO: 2266 - DNA, 1731 bp, Homo sapiens
aggtgggcagatcacgaggtcaggagattgagaccatcctggctaacacggtgaaaccctgtctctactaaaaatacaaaaaattagccgggcgtggtggcggatgcttgtagtctcagctacttgggaggctgaggcaggagaatggcgtgaacctgggaggcagagcttgcagtgagccgagatcgtcgtgccactgcactccagcctgggtgacagagtgagactccgtctcaaaaaagaaaaaaaaaaaaaagatatgtcatgaatttagagaatttaaagtatggagaaaatactcacttttaaagcatagtggctaggaactcaaagttgggttgccgtaataccaattttacgatcttgggtaacataaggtctctaatccttagttttctcacctatgagataagaagcccttatcttataaggtgattgtgaggtttcaatgaaattatatatgtaaaatacactgcttaacaaatgttagctaatagtttatattaggctttatagcagtgtacttttattgttgaactccttatgtattcttttacttgtttaatccttttactttgagaaagtggtaacttgtagagaggaaaagatactgataaatgtaaataatccattgcaaatggctgagtgaaaatcctggaaaatgttttaattgaactttattgatgtaatataaaactattcaaatatctgtcaataaagggtaggattgtatgaaggctcattttagaaacttgagactaagtgactgatctattattttagaagttaataagttgtatagatatatggctgtcaagctggaaacaacatgtactaactttccttgaacgttggtatggcctctgaggttttggcagtggattgtgaatagaagtcatgtgtgacacctttgtgttttgccttaaaaagcaatacatgagtactgccccctacctgtgtcctcttcttgtgtactgataattgatgaaaactcgagtccgcagaatttggacccagagattgaagtatgtgttgacctgcctcaccagctctacacagcttatttctagactattacttgagaaggaaatcattttctatcatatttaagccatgtattttaggatctctttgttacagggtcttagcctatatcctaactgataccttttaaagaacagccaaacagatttaaaaggaaccaaatagtacttctaaatatgaaaaagggaattgaaataaaaactcaatgggtaaatagggatgcctagagaaatgattggttggttccaggtctgggacaggaaaaacagaggatgatcctagaacactgtggtgcaagaaagtaaggaagtgcttaaaagaatattgcttggcaatttaaaaaaagggaagaactgatacatgtgatggtatggatgaacctcaaaaacattgtgctaaatgaaacagccagacacataagactgcatattgtatgaaatttctagaaaaggtaaaactaaagacacagaaagtaaatcaatgtttgcctgcagttgggtattggaaccgggattgactgcagatagacattatagaacttttggagtgatgaaagtattctaaaactggattgtgatgaacgttgcacagctaaatacatttgttaaaagttgtacacttaaaataggtgaattgtgtgtaaattatatttcagtaagactgtaaaaaattttgagagatactgta

SEQ ID NO: 2267 - DNA, 3364 bp, Homo sapiens
caggatgagtgagactcttcgctgtatcgtctactgagtcttaaaatgttacaaatcttatttgacgacttacatggtacggtgcaatttttgatgtccagactaaagttagttttctctaggcaaacagtaattttggttaaaaccaaaatacgttttctgaattactgttctttttttattttcaggcttctggagttacagttaattatgaagttatcaaagtttttaatgatattaaagttaggaaatcttctacacaagaggagatcaaaaagagaaagaaagcagttctcttctgtttaagcgatgacaaaagacaaataattgtagaggaagcaaagcagatcttggtgggtgacatttgtgatactgtagaggacccctacacatcttttgttaagttgctacctctgaatgattgccgatatgctttgtacgatgccacatacgaaacaaaagagtctaagaaagaagacctagtatttatattctggtgtgtaaaaacaaaagaaaaaagtacttttaaaatgcaaggattattattatcatagtcagtcttacctttgtttttcttataaatgggattcaataattttttttttttctgtagggctcctgaaagtgcacctttaaaaagcaagatgatttatgctagctctaaagatgccattaaaaagaaatttacaggtacaaacttgaatatttggggcagagaaattattctttattaattataataaagtaataggataatgttttttctttttaggtattaaacatgagtggcaagtaaatggcttggatgatattaaggaccgttcgacacttggagagaaattgggaggcaatgtagtagtttcacttgaaggaaaaccattataaaatgacagtcaagtgccatctggatcttaaggagcttccatttctccagctcagtccattggaatagtattaggttttggttttttgttgtatttccccctttccactgggcccttccaacacaatgaatgaaggaaatatcatttatttaagcagcctatcagtgattgccattagactgttgaatactgttacttttatatagaacccaaggaatgccttcctgtcatattttagccaaaacaactggttatatgcctcccttgcagcaagcactacaatgtatgtgatcgtcaatgtgaatagcttagaatactgcaaaggataagctaattgaatgccttgaaagtattatccactggtcagatggtcaacttttttcagtattatttatagttggcacttgattgcagttctgtgaggcttgagcattcatacacctcacctgccttggcaagcctattttagtgatatggcagcacggatataacactatgcattaaaagcactttttgtaataagtttaatatcctaaaaggaatgccaattaagttttgttaactgtgtcatcaacttatcctagtacctcagtgttcattcctgttacctgcatatcttcttaaaagaaatagctgttattaatgcctttttgttttccattgagtgtacactactgaataagtgtaggagttttatgtttaccatgtgagtcctgcaacactaaagatattttgaatatcagtcatgatggcaatttctgtataaaagagccttaaatggaacattgttttgagatcaaactccccaccctcacaaaaatggccacgttgcaataaaaattgtggcatattacagaacgttgccttgttttccttggaaattttgcaaaatgttatgtgaaacaacttctagggtaaaaacagctattactaatctctgcactggtcatttgagaattttttttgtacagcattcatgtgtgatattttccagatttgttggatctatttggtttaaaaagtattctatcttaaggccaactaatataaaataccattgttaaagaatggtacttttataaacattagtgtatttatttcctatgtgttaatatgaagatcagaaattattttttgcactttggcataaatacttttcaatatctgatttgttctctggataaattagcatagttatttttttattcacatttacatttctaagtagttgtatagtagaagcaggaagctcttattgcttatttggtcgtaatgaaaataatttgtaaaatgtcctttaaaagtttaatgatacttctgatgtttcggaacagtcatttcacctactatttctgaatatattttgcaaattgaattggaataggaattgataatagcagtcttaaacattagtagtgggatttggctatggtccagactgtgctccttatagagaatttgatctgctcagtgtgagcggtttgctgttagccagggctatttatggcaaacacatgcttttgtatcttgtcatagttatccacaaatggcaaaactggacttgattctactggtatgcaaaacaggcatgctagtaagcagtcagtcgtggctcagaacttaaccccatagctcagaggaatgcttttagcagaaaacaggaaagaaaatatcccttaaaaattttttttgaatgtgtggaagtaattttagtataattagattttttccatatttttgaaagatttttcagatgtgaacattaaaaatagggattaaatgtctaggcttccatttaaaattatatgaatggtttgggatctttttgcactgagcaattttatttcaggcttccagctgtccctgtgagttatcctggacatttcgatggtttttggtaaggccaaactctgataagcaaaacagagaatactgacgtatacttaaccatatgtgtaactgatacttggcaccatggaatttttcattgagttatttcctcattcttttaaaaaataagggactataaatcagttatgtagtatcttttgtttttgtagctgattccttaactttcttgtatgcctctagtaatttcagagattaaatattgctttaaactgtgatactttgatttgctagattgacaaaactgatactaatataattaagttcatctttgaaatacatctttgtgcgtagagccaaaaaaagagataaaattaataatagttcacttgttatttgagattaatttggcatttgaaatgatcattttattttacaatcatttataatgaatcaatgttccagttagctttaaaaggtatacggtgctaattagtaaaatattgaaggcaatattttactgctagcttgcaaagttatgagagtttaaaaaataaaatatatgaaaatatgtaaagctgttgagatgtgtttacttatacttcagaacattaaaagtttaaaaactggta

SEQ ID NO: 2268 - DNA, 455 bp, Homo sapiens
gtatctcttttgtagagactgagtttggccatgttgcctaggctgatctccaactcctgggctcaagctgtcctctgacctccgcctcccaaaagtgctaggattgcatgcatgagccaccacttcaaaagctcaaatactgcttttgaagacagcatgagtttatggatgttctgtctcctttcagcccataaagaagtctgaggcttttcttttgctctggaacatccaactaattgctttatttccatgtagaagtagaggaatcatccctccacttaaatttcctctcataatgcaatttggcaaattaaatctctaaatctcagttttttaacccatagtatgggaacggtaatatctgtttaccatgtttcctgagtactaaatatggaaatggtttttgaaaacaggaaaatgctatgtaaatgcaataatctgtttaaactattcat

SEQ ID NO: 2269 - DNA, 1022 bp, Homo sapiens; identical to SEQ ID NO: 2202

SEQ ID NO: 2270 - DNA, 3499 bp, Homo sapiens; identical to SEQ ID NO: 2203

SEQ ID NO: 2271 - DNA, 3498 bp, Homo sapiens; identical to SEQ ID NO: 2204

SEQ ID NO: 2272 - DNA, 529 bp, Homo sapiens; identical to SEQ ID NO: 2205

SEQ ID NO: 2273 - DNA, 529 bp, Homo sapiens; identical to SEQ ID NO: 2205

SEQ ID NO: 2274 - DNA, 1402 bp, Homo sapiens
aagactagaccaaggaagggagcccaagggcccttgaaatccttctgtccctcaggaggaagaggaggaagaggaagctgagaaagaattatttatcgaagatccaagtccagccatttctatactggtcctgtcaccacgctgctggcccgtctccccactctgctacctgtaccatcccagaaagtgccttcccacagaattctgtgatgcccttgaccgtttctccagtttctacagccagagtgaggaactagggagaggaaattggagatcggggtgagattcggggtggcaagagaggaagaggagaggacctttggacaggatatagatgtgaagaaaaatatcagctcctagcgagggatgagaaagcatgggttgtagtttcattaatttctgctctcatcagtttcttcaactttctatgaatttgttctgttttctttttctaacttcaagtgaggtgcttatttgatttttagtcttttcagacttttttccaaataaaagtgtttaagactattcatttccctctcaatactgctttagtggcatcctataaagttttaaaagattttttttctttatttttttgacatggagtctcactctgtcacccagaccagagtgcagtggtgtaatctctgctcactgcagcctctacctcccgggttcaagcgattctcctgtctcagcctcccaagtagctgggactacaggcgtatgccaccacacccggctaattgtgtatttttagtagtgacggggtttcaccatgttaaccaggctggtctcaaactcctgacctcaggtgatccacccgcctcagtgagccactgtgcccggccaaaaagattttttagattgggatataactagtattcagtaaagtgcacacgtcttaattataaggcttcatgaattattatattcatatacacccatgtatctacctccctcatacccccatcaagatacagaacatttccagcatcgtagaaggctgtctccttcatgccccctttccagtcaatgtcttcttccaggagaaatcattatttttaacctttatcaccatagatttgtgcctgtatttgaacatcatataaatggaatcatacagtattctgctgtgtctgatgtctttcacgaaacatactgtctgtgagggttattcaggttgtcaagggtatcattagtttattcatttattttgctgagtcatattccattgtatggatgtatttaccctttctgctgtttatgggcatttgggatgttctgtaagtttttattacgtattatttttattattgtttagttctaagaattgttaaatttctattattatttctttattttgtttttcagaagaatatatattttaatttccaaacaa

SEQ ID NO: 2275 - DNA, 1402 bp, Homo sapiens; identical to SEQ ID NO: 2274

SEQ ID NO: 2276 - DNA, 1402 bp, Homo sapiens; identical to SEQ ID NO: 2274

SEQ ID NO: 2277 - DNA, 3384 bp, Homo sapiens
gccagggtggtggtgtttgggggtgacagcaccagctgcatcggcactgagctcaacacggtggggacccttgtgcccaccttcaccttgctccacatccttctttttgtcccagtgcctgtgggaaggacctagtccctggggaatggtgacatcccttccccttgggaaggtgttgccttgtaagcagtgagagtgggattagggatgcagagccacgtccatccctaggctctgcgggagaagtgaagggcacacaccatgaccgacttggttactgtcaacaatttttccaaccttgtttctggaggtgacagttctctccctcttctcccctgccctaccaggtgaatgtgatgccctctgccagccgggtgatcctcttggagaacctgaaccgcttctggcccatcatccagatccgcataaagcgctgccagcaggtggtgttagggtgtcagccagggctgaggaggaggaggtggcacacaagtttctccttgatctgcttgggagatggcccaggacctgttgagtcccagagatgtggggatgtcctgagcagttctagggagctcagggcaggaggcttggctttggtagtacttagtggctcaagcggcttgggtgacagataagtctgtgcatgttccagggcggcattgacacccgggttcggggtgtggaggtcctgggccctaagcccacattctggccactgttccgggagcagctgtgtcgccgaacatgtctcttctacacaattcgggcacaagcctggagccgggacatagcagaggaccaccggcgcctcctccagctctgtcccaggtgggtggggcctgaggagggaagatgggtaagggaacaggacactgtgagaagtaggagggatgctcctgtgggagtccggaagggaaagctgcagccaggacatgagggggaaggtgaacgtaggtgagaagtttgtgttaattgggaaaagttgggtcagggaccgaacaggggtgattgggagctgatctgcacttgaatggaggcctctgggaaatcggtgccattaatcctccgccatgcactgtttgttcccagactgaacagggttttgcgccacgagcagaattttgctgaccgcttcctccctgatgatgaggccgcccaggcactgggcaagacctgctgggaggccctggtcagccccctggtgcagaacatcacctctcccggtaaccatgctgacacctggccccactaaccagttccttgtccttattcccagggatcacctgagttaatgctcttggttcttttggttcctgtctttatccctgaaggcctgtcacctcagtgttcctctctccttcctgccccaggcactgctccctgagactctggtatttgaatctttcccactaccccatccccaccctgttaacatttcccctgactccagctgaaacaaaccttggtgaggggaggactagggccccactacccctcaagcctttttgtacaattgatctttctccctcctctgccctgagctgtctgttctcccatctcccatggagacctgttcctgacctgtcttctttcagatgcggaaggcgtgagtgccctgggatggctgctggatcagtacttagaacagagagagacctctcggaaccccttgagtcgagcagcgtcctttgcttctcgagttcgtcgcctttgccacttgctggtgcatgtggaacctcctcctgggccttctcctgagccatccactcggccctgtaagtcccagctgtggccagtggagctgactctgcggacagtggtgtatctggctccctcctccctgggtcttactcttgctgctttgctaccggcctttccaggcccctgagacctactggcctttccaggagatcactacccaagaccggtgtactcacccagaggctgagatgaaaccccttccttctccctctgtctctacagtcagcaagaacagcaagggtcgggaccggagcccggcgccttcgccagtgcttccaagcagcagcctgaggaacataacccagtgctggctgagcgtggtgcaggagcaggtgggcagaagcaagcagaagtctgcagaggggaggggctgctccttttatgtcatttcttgcctttctcctcaggtcagcagattcctggctgcagcttggagggccccagactttgtgcctcgttactgtaaactctatgagcacttgcagagagcaggctccgagctgtttgggcctcgggcagccttcatgctggctctgcgcagtggcttctctggcgccttgctgcagcagtccttcctcactgctgctcacgtgagtcccaccagctccccacagggctataagcttgtgttccaagttcatctctttctgctctgccctttcacctcctttcgctccccagtctcctactccactccctcattcatggtttgctcatgccctttcccctgcccccagatgagtgagcagtttgccaggtacattgaccaacagatccagggtggcctgattggtggagcccctggagtggaaatgctggggcagcttcagcggcacctggaacccattatggtcctttctggtctggaactggccacaacttttgagcacttctatcagtgagtgcaggtctggaggcataggggatgggaggcctagatctagagagtggaaagatttgagtcttataggggagatgagaaaagaggctgtgtagaggagagattaagatgtggagatggctggccaggcgcggtggctcacgcatgtaatcccagcattctggcaggcagatcacctgaggtcaggagttcaagaccagcctgaccaacatggtgaaaccctttctctactaaaaatacaaaaattagccaggtgtggtggcgtggtggcaggcacctgtaatcccagctattcgggagggtgaggcaggtgaatctcttgaacccgggaggcagaggttgcagtgagccaagaccacgtcattgcacttcagcctgggtgacaagagcaagactccgtctcaaaaaaaaaaaaaaaaagtggaggtggtcatgcattggtggaaagggagtgggaaagaagaggtgaggtagggtatgtgactcaggcagagggacagagggacctacattctcgagggggaggctgggccacgctggcacccacactgaggcttggcccgggctgtgtgtgctgcaggcattatatggcggaccgtctcctgagctttggttcgagctggctggagggggctgtgctagagcagattggcctctgttttcccaaccgcctcccacagctgatgctgcagagcctgagcacctctgaggagctgcag

SEQ ID NO: 2278 - DNA, 593 bp, Homo sapiens
ttttaatttttttgagacagagtctcactctgtcacccaggctggagtacagtggcttgatcttggctcactgcaacctccgcctcctgggttcaagcaattctcctgcctcactcagcctcccgattagctgggattacaggtgtgcaccactatgcctggctaatttttgtatttttagtaaagacgaggtttcaccatgttggccaggctagtctcaaactcctggcctcaggtggtccagctgccttggcctctcaaattgctgggattataggcgtgagccactgtgctcggctgtaatcagtttaaatttaaatagttacatgtggctaatggctactatgatggaccatgcaggtttagaaattccagagtcaatgaaacattattatgaagtgacattctttctttctaataaagctttttctctagaagtctgtttttctctggtattaatagtataccagctttctttggttactggctttccagtttatatttttctatctttagctttttgtttttgcatggagagaagttcttaatcttttgcatacctttttttaaattatggtaaaatatatctagcg

SEQ ID NO: 2279 - DNA, 7199 bp, Homo sapiens
tttttttgagttggagtttcactcttgttgcccaggctggagtgcaatggcacgatctcagctcactgcaacctctacctcccaggttcaagtggttctcctgcctcagcctcccgagtagctgggattgcaggcatgtgccaccatgcccagctaattttgtatttttagtagagatggggtttctccattttggtcaggctggtctcgaactcccgacctcaggtgatccgcccacttcggcctcccaaagtgctgggattacaggcatgagccactgtgcctggcctgacttcactcgtttctaccccctcaccagggtcataacccgactgctggatttccctgaggcaatggtcctcccctggcacgaggtcttggagccctgcctcaactgcctgagtggccctagcagtgactccgaggtaccagaaccctggcaaggagaagagagggaagggcagcatctggggcaccaactccttgtgaggctctggagggcacagcagagcctttctgaatggatcttggggcactgggatgggtgtaggaggaggaagggtaatgtaatctaagaatctccagaactggaatctttgaagtataaaccttttagatgattttagatttggagtttagattctggactaaggagaagcccacattcaccaatccagacagctgtcctcccttccgggtttgtgcattggagagcaaggctcaggcaccagggttaacatagcttggcctgggcaggaagcagcctggaaagctgtgcccaagctctgttctgccaactcactctggagtcccagcactcctctattttactccaccctgaatttggtactcttgtttccctgggcgttggcatgtctccacaatctcagccacgacacttcctttactgaaccctctcctcaatccttacatgtcctacctcttgtttcctgtaaattaatctatgtggctctgggctcagattgttcaggagctgacctgcttcctacatcgcctggcctcgatgcataaggactatgctgtggtgctctgctgcctgggagcaaaagagatcctctccaaagtcctggacaagcactcagctcagctgctgctgggctgtgagcttcgggacctggtgacagagtgtgagaagtacgcacagctctatagcaacctcacctccagcatcctggccggctgcattcaggtgaggagcggctgtgggtatgcagctgagagaatgcaagtcagaagcaggagaaggggattcactgtgttcctctttggtatccctgtttggcacaggttgtagcaaatctggggcacttgtttcctaaccttgactccacatggttctgtcaaaatgtggggagagaggagttgagtataccgttgacccttgactttttctctctacctgtttctgggcatttctctgtgttcctccctctcctcttcctcattctccctgatgttccggctgcagatggtgctgggccagatcgaagaccacagacgaacccaccaacccatcaatatccccttctttgatgtgttcctcaggcatctctgccagggttagtgccctcatctgctttctcctggctcccatccagtgtctgttctccccttcccttcctgctccttagaccttttcctttttcctctcaactaacctagctgtgactgccaccccttcccacttgcccccaggctccagtgtggaagtgaaggaggacaagtgctgggagaaggtggaggtgtcctccaacccgcaccgagccagcaagctgacggaccacaaccccaagacctactgggagtccaacggcagcaccggctcccactacatcaccctgcacatgcaccgtggtgttcttgttaggtgtgaacacacatatatgaatgttctgctgtgccccaggatacttccccaaagcacccagatacacacaaccccagctataaccccaatgcctgagggacacactcaaacctattttgtgcagtgaacacatagacacattgacctgcctttgctgagtatagacatcccctcactcccagagtctggtgatctgtactccaacaggtacagatggcactgccctgtgcttagtgttgagggagataaacagctcacttatccatttctcctttgggcatttgcttaatgccaggcatttgtgtcaggcactgtgcaagggtctcgaaatagaaggacaataagatatggtacctacattccagctggggagctacactagaaaatcaagtaagagcacagagtaagaaaaagcattgtggtccacatgtggacctgagactgacaggcatgagagcagacttccttctggaaggagggggtgactgagctgggttttgacattgaaattaggtagataaagagggggcaatattctaggcataaggacagcatatgtgcaaaatggaagtaagaaagtatatttggagggactttaagtcatcatatttggttacaattgaaagctgtgtatatctttatttttatttttttatattttttgagatggagtctcgctctgccgcccaggctggagtacagtggtgtgatctcagctcactgcaacttctgcctcccgggttcaccccattctcctgtctcagcctcccgagtagctgggactacaggcgcctgccaccacgcctggctaattttttgtatttttagtagagacggggtttcaccgtgttagtcaggatggtctcgatctcctgacctcgtgatccgcccgccttggcctcccaaagtgctgggattacaggcgtgaaccactgcgcccggccgaaagctgtgtatgtctaagtggcggaagatacaggccagaaaagtaggcaaaggcagatcacaaaatgttttgtgagctaagcagtttgaactttattccaaaagttgggagagccattggaagattttaagaagggaggagagaaaactagattttttattgagaaagctcactctggcaactatgggagtttgcgctggaggtagaagaaggaggtggaaggtgtatgcagtgctctagtagagaaaggatccatgtgttcagttagacagcaggagtgggaactgactgggaaatcctcagagatggagtccacaagacttgcctttgggtgagggaagccatgagaaggtgaaggcctcagtgacagtattctagttgagtactgagtgcacggaagttttatttcccaggagagaaacaggaagcgggacaggtttatgtggacagatgatcatttcatttgggcatgatgactctgaggtgcctgtgggacatgacatggaaatacctgttggggacacagcatgaaagctcaggagagtggtctgggatagagatgtgtatttggagtcctctgtgtattaattttcagttgaaactgtgggtttaaattaagtcactttgggtgaatatagagggaagagcagagggtctagtggggacagctgcctcaggagccagcagaggaacaggagcctgagaaagaagtggtggcttgaaatagttttgaactgaaaccagggctctggcctttttatttccttcttttgatttttatttcgtagaggtggggtcttgcagtgttgcccaggttgatcttaaactagcctcaagcgatcctcccacctcagcctcccaaagtgttgggattacagatgtgagccaccacgtccagaggcccagctttgactgtttcctttcttctttcccaggcagctcactttgctggtggccagtgaggactcaagctacatgccagccagggtggtggtgtttgggggtgacagcaccagctgcatcggcactgagctcaacacggtggggacccttgtgcccaccttcaccttgctccacatccttctttttgtcccagtgcctgtgggaaggacctagtccctggggaatggtgacatcccttccccttgggaaggtgttgccttgtaagcagtgagagtgggattagggatgcagagccacgtccatccctaggctctgcgggagaagtgaagggcacacaccatgaccgacttggttactgtcaacaatttttccaaccttgtttctggaggtgacagttctctccctcttctcccctgccctaccaggtgaatgtgatgccctctgccagccgggtgatcctcttggagaacctgaaccgcttctggcccatcatccagatccgcataaagcgctgccagcaggtggtgttagggtgtcagccagggctgaggaggaggaggtggcacacaagtttctccttgatctgcttgggagatggcccaggacctgttgagtcccagagatgtggggatgtcctgagcagttctagggagctcagggcaggaggcttggctttggtagtacttagtggctcaagcggcttgggtgacagataagtctgtgcatgttccagggcggcattgacacccgggttcggggtgtggaggtcctgggccctaagcccacattctggccactgttccgggagcagctgtgtcgccgaacatgtctcttctacacaattcgggcacaagcctggagccgggacatagcagaggaccaccggcgcctcctccagctctgtcccaggtgggtggggcctgaggagggaagatgggtaagggaacaggacactgtgagaagtaggagggatgctcctgtgggagtccggaagggaaagctgcagccaggacatgagggggaaggtgaacgtaggtgagaagtttgtgttaattgggaaaagttgggtcagggaccgaacaggggtgattgggagctgatctgcacttgaatggaggcctctgggaaatcggtgccattaatcctccgccatgcactgtttgttcccagactgaacagggttttgcgccacgagcagaattttgctgaccgcttcctccctgatgatgaggccgcccaggcactgggcaagacctgctgggaggccctggtcagccccctggtgcagaacatcacctctcccggtaaccatgctgacacctggccccactaaccagttccttgtccttattcccagggatcacctgagttaatgctcttggttcttttggttcctgtctttatccctgaaggcctgtcacctcagtgttcctctctccttcctgccccaggcactgctccctgagactctggtatttgaatctttcccactaccccatccccaccctgttaacatttcccctgactccagctgaaacaaaccttggtgaggggaggactagggccccactacccctcaagcctttttgtacaattgatctttctccctcctctgccctgagctgtctgttctcccatctcccatggagacctgttcctgacctgtcttctttcagatgcggaaggcgtgagtgccctgggatggctgctggatcagtacttagaacagagagagacctctcggaaccccttgagtcgagcagcgtcctttgcttctcgagttcgtcgcctttgccacttgctggtgcatgtggaacctcctcctgggccttctcctgagccatccactcggccctgtaagtcccagctgtggccagtggagctgactctgcggacagtggtgtatctggctccctcctccctgggtcttactcttgctgctttgctaccggcctttccaggcccctgagacctactggcctttccaggagatcactacccaagaccggtgtactcacccagaggctgagatgaaaccccttccttctccctctgtctctacagtcagcaagaacagcaagggtcgggaccggagcccggcgccttcgccagtgcttccaagcagcagcctgaggaacataacccagtgctggctgagcgtggtgcaggagcaggtgggcagaagcaagcagaagtctgcagaggggaggggctgctccttttatgtcatttcttgcctttctcctcaggtcagcagattcctggctgcagcttggagggccccagactttgtgcctcgttactgtaaactctatgagcacttgcagagagcaggctccgagctgtttgggcctcgggcagccttcatgctggctctgcgcagtggcttctctggcgccttgctgcagcagtccttcctcactgctgctcacgtgagtcccaccagctccccacagggctataagcttgtgttccaagttcatctctttctgctctgccctttcacctcctttcgctccccagtctcctactccactccctcattcatggtttgctcatgccctttcccctgcccccagatgagtgagcagtttgccaggtacattgaccaacagatccagggtggcctgattggtggagcccctggagtggaaatgctggggcagcttcagcggcacctggaacccattatggtcctttctggtctggaactggccacaacttttgagcacttctatcagtgagtgcaggtctggaggcataggggatgggaggcctagatctagagagtggaaagatttgagtcttataggggagatgagaaaagaggctgtgtagaggagagattaagatgtggagatggctggccaggcgcggtggctcacgcatgtaatcccagcattctggcaggcagatcacctgaggtcaggagttcaagaccagcctgaccaacatggtgaaaccctttctctactaaaaatacaaaaattagccaggtgtggtggcgtggtggcaggcacctgtaatcccagctattcgggagggtgaggcaggtgaatctcttgaacccgggaggcagaggttgcagtgagccaagaccacgtcattgcacttcagcctgggtgacaagagcaagactccgtctcaaaaaaaaaaaaaaaaagtggaggtggtcatgcattggtggaaagggagtgggaaagaagaggtgaggtagggtatgtgactcaggcagagggacagagggacctacattctcgagggggaggctgggccacgctggcacccacactgaggcttggcccgggctgtgtgtgctgcaggcattatatggcggaccgtctcctgagctttggttcgagctggctggagggggctgtgctagagcagattggcctctgttttcccaaccgcctcccacagctgatgctgcagagcctgagcacctctgaggagctgcag

SEQ ID NO: 2280 - DNA, 593 bp, Homo sapiens; identical to SEQ ID NO: 2278

SEQ ID NO: 2281 - DNA, 586 bp, Homo sapiens
ttttttgagacagagtctcactctgtcacccaggctggagtacagtggcttgatcttggctcactgcaacctccgcctcctgggttcaagcaattctcctgcctcactcagcctcccgattagctgggattacaggtgtgcaccactatgcctggctaatttttgtatttttagtaaagacgaggtttcaccatgttggccaggctagtctcaaactcctggcctcaggtggtccagctgccttggcctctcaaattgctgggattataggcgtgagccactgtgctcggctgtaatcagtttaaatttaaatagttacatgtggctaatggctactatgatggaccatgcaggtttagaaattccagagtcaatgaaacattattatgaagtgacattctttctttctaataaagctttttctctagaagtctgtttttctctggtattaatagtataccagctttctttggttactggctttccagtttatatttttctatctttagctttttgtttttgcatggagagaagttcttaatcttttgcatacctttttttaaattatggtaaaatatatctagcg

SEQ ID NO: 2282 - DNA, 5716 bp, Homo sapiens
ctgcagatggtgctgggccagatcgaagaccacagacgaacccaccaacccatcaatatccccttctttgatgtgttcctcaggcatctctgccagggttagtgccctcatctgctttctcctggctcccatccagtgtctgttctccccttcccttcctgctccttagaccttttcctttttcctctcaactaacctagctgtgactgccaccccttcccacttgcccccaggctccagtgtggaagtgaaggaggacaagtgctgggagaaggtggaggtgtcctccaacccgcaccgagccagcaagctgacggaccacaaccccaagacctactgggagtccaacggcagcaccggctcccactacatcaccctgcacatgcaccgtggtgttcttgttaggtgtgaacacacatatatgaatgttctgctgtgccccaggatacttccccaaagcacccagatacacacaaccccagctataaccccaatgcctgagggacacactcaaacctattttgtgcagtgaacacatagacacattgacctgcctttgctgagtatagacatcccctcactcccagagtctggtgatctgtactccaacaggtacagatggcactgccctgtgcttagtgttgagggagataaacagctcacttatccatttctcctttgggcatttgcttaatgccaggcatttgtgtcaggcactgtgcaagggtctcgaaatagaaggacaataagatatggtacctacattccagctggggagctacactagaaaatcaagtaagagcacagagtaagaaaaagcattgtggtccacatgtggacctgagactgacaggcatgagagcagacttccttctggaaggagggggtgactgagctgggttttgacattgaaattaggtagataaagagggggcaatattctaggcataaggacagcatatgtgcaaaatggaagtaagaaagtatatttggagggactttaagtcatcatatttggttacaattgaaagctgtgtatatctttatttttatttttttatattttttgagatggagtctcgctctgccgcccaggctggagtacagtggtgtgatctcagctcactgcaacttctgcctcccgggttcaccccattctcctgtctcagcctcccgagtagctgggactacaggcgcctgccaccacgcctggctaattttttgtatttttagtagagacggggtttcaccgtgttagtcaggatggtctcgatctcctgacctcgtgatccgcccgccttggcctcccaaagtgctgggattacaggcgtgaaccactgcgcccggccgaaagctgtgtatgtctaagtggcggaagatacaggccagaaaagtaggcaaaggcagatcacaaaatgttttgtgagctaagcagtttgaactttattccaaaagttgggagagccattggaagattttaagaagggaggagagaaaactagattttttattgagaaagctcactctggcaactatgggagtttgcgctggaggtagaagaaggaggtggaaggtgtatgcagtgctctagtagagaaaggatccatgtgttcagttagacagcaggagtgggaactgactgggaaatcctcagagatggagtccacaagacttgcctttgggtgagggaagccatgagaaggtgaaggcctcagtgacagtattctagttgagtactgagtgcacggaagttttatttcccaggagagaaacaggaagcgggacaggtttatgtggacagatgatcatttcatttgggcatgatgactctgaggtgcctgtgggacatgacatggaaatacctgttggggacacagcatgaaagctcaggagagtggtctgggatagagatgtgtatttggagtcctctgtgtattaattttcagttgaaactgtgggtttaaattaagtcactttgggtgaatatagagggaagagcagagggtctagtggggacagctgcctcaggagccagcagaggaacaggagcctgagaaagaagtggtggcttgaaatagttttgaactgaaaccagggctctggcctttttatttccttcttttgatttttatttcgtagaggtggggtcttgcagtgttgcccaggttgatcttaaactagcctcaagcgatcctcccacctcagcctcccaaagtgttgggattacagatgtgagccaccacgtccagaggcccagctttgactgtttcctttcttctttcccaggcagctcactttgctggtggccagtgaggactcaagctacatgccagccagggtggtggtgtttgggggtgacagcaccagctgcatcggcactgagctcaacacggtggggacccttgtgcccaccttcaccttgctccacatccttctttttgtcccagtgcctgtgggaaggacctagtccctggggaatggtgacatcccttccccttgggaaggtgttgccttgtaagcagtgagagtgggattagggatgcagagccacgtccatccctaggctctgcgggagaagtgaagggcacacaccatgaccgacttggttactgtcaacaatttttccaaccttgtttctggaggtgacagttctctccctcttctcccctgccctaccaggtgaatgtgatgccctctgccagccgggtgatcctcttggagaacctgaaccgcttctggcccatcatccagatccgcataaagcgctgccagcaggtggtgttagggtgtcagccagggctgaggaggaggaggtggcacacaagtttctccttgatctgcttgggagatggcccaggacctgttgagtcccagagatgtggggatgtcctgagcagttctagggagctcagggcaggaggcttggctttggtagtacttagtggctcaagcggcttgggtgacagataagtctgtgcatgttccagggcggcattgacacccgggttcggggtgtggaggtcctgggccctaagcccacattctggccactgttccgggagcagctgtgtcgccgaacatgtctcttctacacaattcgggcacaagcctggagccgggacatagcagaggaccaccggcgcctcctccagctctgtcccaggtgggtggggcctgaggagggaagatgggtaagggaacaggacactgtgagaagtaggagggatgctcctgtgggagtccggaagggaaagctgcagccaggacatgagggggaaggtgaacgtaggtgagaagtttgtgttaattgggaaaagttgggtcagggaccgaacaggggtgattgggagctgatctgcacttgaatggaggcctctgggaaatcggtgccattaatcctccgccatgcactgtttgttcccagactgaacagggttttgcgccacgagcagaattttgctgaccgcttcctccctgatgatgaggccgcccaggcactgggcaagacctgctgggaggccctggtcagccccctggtgcagaacatcacctctcccggtaaccatgctgacacctggccccactaaccagttccttgtccttattcccagggatcacctgagttaatgctcttggttcttttggttcctgtctttatccctgaaggcctgtcacctcagtgttcctctctccttcctgccccaggcactgctccctgagactctggtatttgaatctttcccactaccccatccccaccctgttaacatttcccctgactccagctgaaacaaaccttggtgaggggaggactagggccccactacccctcaagcctttttgtacaattgatctttctccctcctctgccctgagctgtctgttctcccatctcccatggagacctgttcctgacctgtcttctttcagatgcggaaggcgtgagtgccctgggatggctgctggatcagtacttagaacagagagagacctctcggaaccccttgagtcgagcagcgtcctttgcttctcgagttcgtcgcctttgccacttgctggtgcatgtggaacctcctcctgggccttctcctgagccatccactcggccctgtaagtcccagctgtggccagtggagctgactctgcggacagtggtgtatctggctccctcctccctgggtcttactcttgctgctttgctaccggcctttccaggcccctgagacctactggcctttccaggagatcactacccaagaccggtgtactcacccagaggctgagatgaaaccccttccttctccctctgtctctacagtcagcaagaacagcaagggtcgggaccggagcccggcgccttcgccagtgcttccaagcagcagcctgaggaacataacccagtgctggctgagcgtggtgcaggagcaggtgggcagaagcaagcagaagtctgcagaggggaggggctgctccttttatgtcatttcttgcctttctcctcaggtcagcagattcctggctgcagcttggagggccccagactttgtgcctcgttactgtaaactctatgagcacttgcagagagcaggctccgagctgtttgggcctcgggcagccttcatgctggctctgcgcagtggcttctctggcgccttgctgcagcagtccttcctcactgctgctcacgtgagtcccaccagctccccacagggctataagcttgtgttccaagttcatctctttctgctctgccctttcacctcctttcgctccccagtctcctactccactccctcattcatggtttgctcatgccctttcccctgcccccagatgagtgagcagtttgccaggtacattgaccaacagatccagggtggcctgattggtggagcccctggagtggaaatgctggggcagcttcagcggcacctggaacccattatggtcctttctggtctggaactggccacaacttttgagcacttctatcagtgagtgcaggtctggaggcataggggatgggaggcctagatctagagagtggaaagatttgagtcttataggggagatgagaaaagaggctgtgtagaggagagattaagatgtggagatggctggccaggcgcggtggctcacgcatgtaatcccagcattctggcaggcagatcacctgaggtcaggagttcaagaccagcctgaccaacatggtgaaaccctttctctactaaaaatacaaaaattagccaggtgtggtggcgtggtggcaggcacctgtaatcccagctattcgggagggtgaggcaggtgaatctcttgaacccgggaggcagaggttgcagtgagccaagaccacgtcattgcacttcagcctgggtgacaagagcaagactccgtctcaaaaaaaaaaaaaaaaagtggaggtggtcatgcattggtggaaagggagtgggaaagaagaggtgaggtagggtatgtgactcaggcagagggacagagggacctacattctcgagggggaggctgggccacgctggcacccacactgaggcttggcccgggctgtgtgtgctgcaggcattatatggcggaccgtctcctgagctttggttcgagctggctggagggggctgtgctagagcagattggcctctgttttcccaaccgcctcccacagctgatgctgcagagcctgagcacctctgaggagctgcag

SEQ ID NO: 2283 - DNA, 1045 bp, Homo sapiens
gtggaggggccctcacgcagcagcccagccactttctgagtgttgtcctggggctctttggaacgccatcttcctcccacttacctgcctcccctccttttcgcaaatgtacagaagccatttgtcacctcagcattcgctgccgaaatgagcaactccattcagtaacgtgggagctgatcccacgggcaggctctccctgctccaggagaagactaggaggaagaatgaggtgctcctgccgtgtccgccttgttccgggtcgcactggaacaggcagcaattcctaagtccggagcgtttgagcgtttgctatctgactgctgatctgcgtgacagaaacaccagcatatttgcaacgccaaggatattggtcttaagtgcaagagcacaaatgagagtgtgagagaaagtaccttctattttaataataatattattataaaaataataaatctttttaacttttatattttatgcactagacaatggatctgcaactttggactaaggtcattcaatgtacccaaacttgaacagggggttcattgttttgctattgactttattatgccactttggggcagagacttggcatcttcgcagtttaagaaaccacgtttcctatccaatccgaagggaaggtgctgtacagttcattcctttgcaccattagccaatctgtcttttatggattctgtgacatgtttatattcacccatgtacattttctgtaaataccaaacgctactgattcccatgccaaaatacatgagtattatgggattgctacctgtataaacaatggcactgtgaaaatactgttagttttaatacaagagaatgcatttgtaaatatggtatagagtttattaatatactattgtttgcagataaaggccttaactttaaacatctttcatcttctgaaagctgcccaacttaaatcctcatagatgtctttctcaactgccttcccatgttcatctgtatgttttccagctaaggtcacaaaccaaaactgaataaagtctttgaggaaaca

SEQ ID NO: 2284 - DNA, 1045 bp, Homo sapiens; identical to SEQ ID NO: 2283

SEQ ID NO: 2285 - DNA, 12988 bp, Homo sapiens
agacttgctctcaggcagtgaaggactggcacattgtgtaataaacagaatcaaaggcagaaattagattacaagccacctgatgatgataaaatcaatcaccctcatcaaagggatttgctttgtgtgtgtttttctctttcattcttgtggatgcagacaggatattgaacagcagctgggctccttgatcttggcaacagacatcaacaggcagaatgaatttttgaccagattgaaagctcacctccacaataaagacttaagactggaggatgcacaggacaggcactttatgcttcaggtaaacgaaacaataaaagccattctttttgctgagtgaaaacactcagctgggctgggtgtggtggctcacatctgtagtcccagctacttgggaggctgaggcatggggatcacttgagtccatgagttcaaggctacagtgagctatgattgcaccactgcactccagcctgggtgacagagtgagatcctgtctctaaaaaaacacaaaacaacaacaacaaaaatccactcagggccatgatcaataattttagcacatttgagaaggagttatctccgatggtatgagttagagcagtgacctattttagtaaaggctttgaaatgcatgaaagttataagtggttcccaactaagcaaaatctgggttttaggtcaacaagttgataaagctcatttttcttgttcagtaactgatttatcacagagtaatcccgctggatgcagtaaaggtctaccgcatttggtggcttggtataaaatcagctactgcaatacccacacattttaaaagactgtttctgaaacacaaaagcatattatattaactatagtacatacaaaaattggaaaacaagtgacctccctttaccttaaacctatttaacctgctttatttccttttactacctaaacttctattttcatctgagtcttaaacatttttatctggtcttatttttaggcagcaaaaaataaaattgaactgaattgaattacattggatcaagtccattcctttctgttttactccacggcaagaagccatttgtgacatgacaaattacatcagggcagagtggatgtcacaaataaaaatgtgacctggtatccaaaccagaaccttctttcttgatcttccattttctcttgtcttccttcttttcttttggtgcaaaaaaacatagtgaatggacctagactcatctagatagatgagatggagctacacctggagattgaatggtgcagtcttttttgttccaggctttcatgctaccctttgtagctgtccaaagtgctccatctttgccaggaaataccctactcccagcagtagaactatgactccttccttatttctttccaaactaggcttctagtccctgaatgccacaaggatcaaccaggtgtctgatttgagtgactaaagccaagttgtgaatagctgaaagatttggccttgaacacttgcatttcgaaagaaagccttgctaactcaaatgcattccttaaggcagaggctggaggaggcttctctgacacttacctctacttcaacatgtactggtacccccactaaccaggaaataaatataaacaactaaatttgcaagttgatatgatccaagggtcttccagaccccaacattgctatctgttctgtgatgccaaggaattgggtcaaaccaatggacactgctggtctcttggtagcaggtggtggttaaaagagaatctgcttctctgggaattcaaggtaaccctcatagggtcatcattactgacaaaaagctggcatctcagatccagaccagtgtgaggcaagtcaagaaggccctaatttagctgtgcaaacaaagcattcctgggtttgatacgacttcattccctgactggcagtctgagcttacacatgcagacataaatgccaacacacataatttaagtgatgtatggggtttgtcagtgtggctactgtgagagtgaggtccagatgacctcacttgagcctggccagggaccatgcaacctccctgcatgcaggaggtggagctacagaaggagccaggccatggctttccttggcctgcccacccaagtctcttccagcaagctccatgtccttggactgtggctcttctctcctcactgctataaagccagcattctcaatgcaggctttgtatcatggtgaataagtgcagtttcctgaagaggcatgtcagggaggtactctgtaaatatgggcctggtactgtgagcagactgaacagcttgatagcctctttggcttggggtgcttttgcaactgaaagaacatcctctcacaatttctccccgccctgtcatttctcagatcgccttgaagtgtgctgacatttgcaatccttgtagaatctgggagatgagcaagcagtggagtgaaagggtctgtgaagaattctacaggcaaggttagtagtgatccaacagctgagatttcattgccctgtcttcttttaggcatttatcctaataaaacaggaaatggctgatctatcatgacatttgttctctcatcaactcttgttatcctaacctttctcttttactctcttggaactcatccaaccctttttcggaaaaagttaaaaataaataacattgacgtattgacttactacagaaacaggtagtaatgaggcaaaataaaaatgagcaaaagtgggacattgattataaatggctctcctctgtggatataagaatgtgtgggatagtttgattttgactttgaccttcattttaatgagctgagtgcagcctaaaggctaaatgtcatttgaggtcaatgttttccactctgacagaaggacttagactccttttgtattccttctccttgctttcttaaaaaaaaaaaaataatgaaattggacacagctgaccaaaaagtgagttcttcctttcaaatatagtttcaacagtgaggtagaaggattttgctgtgaaaagacaaatggccctgaattagggtataatttttaaaagattaacctcattcagaaataaagcaatgaattagcaagcaggatcttgatgttgggtggggtatcaacctttaaatacagccttgtttcttcaggctgggtttcaatgtgcaggatgtttgttcaggcatcaacagtgccctcatgctagtgacagaatcaggtttgagaggctgagaacaaataaagcttgaagtgtcccacataccagctctgtggggaggtcaaatagcaacagtgagccttttggagaaggcaccattgaaagatgtgtcaatgacatcgtgatggccccaaagacagaagaattgattgagctcatgtggggccagaagtctctactcactgtatctttctctcagaataaaagtgctcatgtaactcctacaattctgtatataatttcacttgaattgagtaaaagtggttagaaatcaaaatctcagctctagttgcccctaaataaaatctccaaggaaggtaagacaaaaggaaacatgatgaaattggagctagggggctttaaattagatataatcaatattttctttactgtttgatatgttgaatattgaaatatcatattgagagaggggctaagatctctgtccttgcaaatcaaacaatgaaacagagaaagagtctactctagccacttggtttgactcaatcatgcccacatgattaaagtacacaagtcagcatcgactgcagtgtaaccttttattttctcatcttgcaccttatttggattctgagcaccttggggcaggaccatgtcacttatgtagatagtaaggcccatagtgccagtaaatcaaagttgtcaactaagtacagtaaatggtatcaaccaagaaatgtaacctataagatctcttttcttgggcctggtgcagtggctcatgcctgtaatcccagcactttgggaggcttaggcaggtggatcacctgaggtcaggaacttgaaaccagcctggccaaatggtgaaactcagtctctaatcaaaatacaaaaatcagccgggcgtggcggcacaacctgtagtcccagctactcgggaggctgaagcaaaagaattgcttgaacccaggaggcggaggttgcagtgagccaagatggtgccactacactccagcctgggcaacagagcaagactccgtctccaaaaaaaaaaaaaaaaaaacccttttctcaaaactgcttattgtcctagtaatatatgcatgcattataagatggaaaaacctagaacatttgtaacactgatctctaaaggcaggcttccatgtaccttcctctggcatgtttcctggcagaggaagaatagaaagtatatctagtcctttttatttaatagccttatggtctagtagaaattctgcttgttttaagagaagattataggctgggcatggtggctcacgcctgtaatcccaagactttgggaggccaaggcgggcggatcatgaggtcaggagatagagatcatcccggctaacacggtgaaaccccgtctctactaaaaatacaaaaaaaaattagccgggcatggtggcgggcacctgtagtcccagttacttgggaggctgaggcaggagaatggcatgaacccgggaggcagagcttgcagtgagccaaggtcacgccactgcactccagcctgggtgacagagcgagactctgtctcaaaaaaaaaaaaaaaaagaaaaagaaaaaaaaaagagtagattccctggtcatccaaactgcctgtcctccctactgaattattatttttttaattctataaggatgacttgtgtcattttgatttatctttcagtttaagatttggactcatctcagctcattccagcctgctcctggcaggcaggcttccacagactactaactgtcctggacaaagtacctttaatgtgattcatgatgttaagcaaaggaaaacccttaaaatcaaggttgaggacacagggggaaaggaaaacaagaacccatgaattagaaaaactgtttcattctcagaacagagattaggactccaaataccatatatctccctcctctccccgaaaaaaccttaaaaaattagactttgtcctcttgtaactacagattgatatcatctcaacctagtttcctagaacattttattgaacatctgcttccagccttgtctaatcctcaacaaaactgattatcctatgtgcaaagccccattggagatattatgaagaatgcaaagaactacaggtagtctatgctttgtactctcaaagtactaattagtatagtttccagaggaaagaaactatgcaaatttcccctttatattctctacattggttagcaaagtgtctgaaacataaacgtgttgaataagtgaatgaataaatgatctaattggaaaacctctaatgatagtggtcacaggagaagatccagtaccttgaaaggtagaatctgagctcagttttgagtgatgtgcattgttctatactttccaatatggtaacaagacacatgtgactggttaaatttaaattaaaagttaataaataaaaaatagagttcctcagtcttgatcatatttcaaggggctgccacagtgggcaacgtagagaacatctccatcattgcagcaaatcccattagagagcgctggtctagatagaatggaatggaaaccactgaggccgggatgcaccctgccttgtagaccagctcagtctcatagaagataagaacgagaggattgtggaggcccctgggcaccaggctacagtagagaacatgacaatgggagttatctcagaaagtgcatttagggcaatatatacagttgaagtggaagaagaattggaggaagaaaactagctaagaagcaacaactaagaataaattatcaacacaccagaccaggttaaagcagagtgaaagggggcaaaaaaagttcttctaagagggagaaacaggatgtgaaacaagatttaagaggaagaaacaagcagggacccttgcagggtccccagccaggctcagatgagatggagggtgaagggaagggagaagtcaaagacaactcctccaaagtgtcacacttgactgaaaaatcactattaacagaattacggaggtgaggagtgaaactggctgtaggagagtttgtcttaatattatatggtgttctggcctgccctcagaaggctatgatcatctggagttgaagagttagggtggccagactgccctgaaccactcaggttaagcccgaatgatttcctcacttcagccttgaggattaccaggcacaagagaccccaggaggcagactacagtcttaaaatgacagaactgcagcctctgtagggcttcagctcaatggttaagtgcagacactttgaagccaaacttcctatgctggaatccaggctccccactttactagtggtgtgacctactagcaacatactgggtcagcatttaaccctccctgtgtctcagtttcttcatctgtaaaatggggattataataaggttgttatttggattaaattaattaacatatgcctgggaggagggctcacacctgtaatcccaatgctttgggaggctgaagcaggaggattgcttgaagccaggagtttgagaccagcctaggcaacgtagagatcctatctctatttaaaaaaaaaatgaacaaaacaatattagccaagagtggtggtacatgcctgtagtcccagctactcaggaggctgaagcaggaggatcccttgagctcaagcgttcaagggtgcagtgagctatgatgacaccactgcactctagcctgggtgacagagtaagagcctgcctcttacaaaaaacaatgacaattttttattaacatatgtaaaatgcttagaacgtgcctggcacacggtagtcactatataaatgttgtgtttttatctcttctactttagcagagtagattcataactgaaccttccactcattaaccagattgttttttccaacacaaaaattactcaatttgttatgctcaggaaggactgatgaagtatttcaataaagttttgtacaatacatttctcctttgatcttctattaggttggtgcaaatgtaattgtgggttttgccacggaaagtaagggcaaaaaaaacacaattacatttgcaccagcctgatagctgaccaaggcattaaaaaaaaacattttgagctgggtgcagaggctcacacctgcaatcccaacagtttggaagatggaggcaggaggatagcttgagctcagaagattaagactagtctggacaacatagcgagacctcatctctactaaaaataaaaatttaaaaatatacattagccgggcatggtggtgcatgcctgtagtccaagctacttgggaggctaaagcagaagggttgtttgagcctaggagtttgaggctgcagtgagccaagatcatgccactgcactcaagcctgggtgacagaatgagactctgtctcaaaaagaaaaaaagaaataccattctgacctttatactttttttcaccttcagttgcattaggtaaaattctaaggaatcagaatgggagattctgattaattttgtggttacagagtgaggtgctactcagatgagatctttctagtccttctacctcatttcctacctacttactgttcctggttgtcctcaggtgaaacaagactagggtcaggcagcgtgaaagtagaggagggagaaggaaggacaaaacctgttttcttaacctgtcacttaaagccataacttttatttcatgtgaggaaatttctcatttgttttcttgtttttgtaggtcttgttcaaaagtttattctagtcccagagcacacctactagcaataagccattatgaacggtcattggcactgtggtattttaaatttttacggaaactactgaagtaaggcagagcaagtcggtgctgaagggtccctaagggataacaagtcaggaaacagtaattcccagaataacttcttccgacgaggtcattaaaattattaatactcattttataagttctagattaccaatgtgtttttttctttctttctttcttcttaggtgaacttgaacagaaatttgaactggaaatcagtcctctttgtaatcaacagaaagattccatccctagtatacaaattggtgagttgaattcagtgttaattccaaataaatacctttggcacatctcacaaaagtgacaaagaaaagatctaaacacagctttcaaaagatcagcactggaggtttaatcaacatccttttgaatggctgagtccaaattaatactttaatcatgactaatctactagctaattatctattgagaacttatgaaacctaggatcgaagctttgttataggcccttaactaacttgtattattttaatttggtagtttagaatagaatcaaaaccaaaaagagtagaagaaaagtaacaggaatcaactattcatactctctgcagggcttgaaggtgggaatcagcagaatctgcctttaggacccttccaatctgggtcgctacccctcatccctaatgctcgctcccaagaacccaatctctaggcctagagcttgtgagccatgctatcccgccgcatcctgggattcccagtttcactagtccttccttcaaaacttattttcaggttattctcctaaaaccacactctctttcaagtgtcactggtgggaaactgttgaagtatgatgccaatgcatccaaaataattattgctttatctaattaagttatgcattagaccaagaagcaaatcaaactgtggaaattttaggcactttagcggaggaaatatttttgcttcggtaagactttctatcacaccttaagacactccatcacgtccacccacctttaaagcaagtctttcttttccttgcagttcccttccattgaatccgaactcagaactttaactcttttccttataaactctgaccctgacatgtaccagttcatgttttatacctgttcctatagacttcagacagctgaacgcattcacagtgctacagacctttgcaaggctcaaagtttaatgctttgacattggtagggaagggggtatctgaaaacataagctgaaaattaagaaaaccagggtaagttagaattacataatatcactgaaggtcaaatctaatccaccgtcccacagtggagtcataaaatcatcctcaggaaataaggacaaaataaatctagctataaagatttcaatggaatatacaactattaaaataggtatgttcgattattgagcatttttttttttcaaattgtccttaatattgttatgtagttttcacaatcaaaccaattcctccaccccaaagctgggagctggggatggtggcatagaaaaaatacaacccagaaaagataatacagagttgctgggtggcttgcaagggaatatcagcaacagaaatgcagcctcagcctcctgggaggcaattctctcctatcaattgccttagccatggaggttctgcagacgtgattcaaaattagatgctaaccaaagtcctaatcctgaggctccctgtgttaagctccagctggaaagaaatttaccaggcaactgtcaatgacattttgaaccccccaaacaaaaggactcacgtggttcagcacacaacctggatttgtgagacagacctgatttcagagattctgtcctgttgttgtcatgagaacacacttattttgtcagatcatatgtcctgattttcagctcaggaaaatgtggttaccatagatacctcttttaaaaaggggctgggggttgagtgaatagggaaatcctatggatgctacaccagcacaccaataataaagagaaagggaaggtgattataaaacaatccttagtacatagatctttctctgcctttgctccacatctgccagctcgtagaggttgagggttgggaagtggggtggcagggacagatcaggctaagccagaaaaatccaaagagataaatggaacttggtggatgctacaggctctagcccccaagacaacaatttttccagtgggtcttcagtaatgcagctatttcctctgtccttattcctctctgactgaaatgttcccctgtttttcctgcctcaatccaaaatgagaattttctgagatctactctcaggcttagatctgatttttctttttaagtaatttatatctacccaagtggaactagggcttaatatctcctccccaactccacgcttccctctctctaccaaattctacattttaaaaggaagatattagccaggcggggtgactcatgcctataatcccagcactttgggaggttgaggcgggcaaatcccttgaggccaggaattcaagaccagcctggacaacaaggcaaaaccccatctccacaaaaaatacaaaaaaataaaattagctgggtgtggtggcatgtgcctgtagtcccagctactcagaaggctgaggcaggaggatcacctgagcccaaggggtcaaggctgcagtgagccatgatcatgctactgcactccagcctgggcgacagggtgagaccccatctgttaaaaaattaattaattaaaacaaaaaaaggtattaaatcaaatgaagctctaattggtgaaatctatagaaggctaaagagaaagaggttttccttcaatccttgtctactctgaggctaccattcctccctactcccccttcctccccgcaaccccccgtcaccccaccatccctccaggaggacaacagcccagcaatgtcagctcatcccttgagaaaagggaggttggcagaacacactgatggaacaggtttccaaatctgataatgtggaagccttccttaatttgaaaaactgcctcttggtgtctattcagactttaaaatcagtttcctacctagcataagaagtctttatatctgaaagtataaatacagatatagtgccagggtcacttaagaaaatgaggcttttctttttttcgagttggattttaaaatgttggatatttaacttttttatactgagataaacttgataaatattcacactttgaacttcagaatagtataattttgcaaagcgtctttttagatatctaatatctcatctctttgaaggtgaatgatattagaaattaaatatggagattgtggaggaggtaaagaaaattcaagaacagcaagcaaaacgtgaaatcctcatctgctgacaccctgtacaaccttaccaaaattccaaatacagacatcaagtcactggtttaactttccccctccagttcaggttctctactatgatctcacaatctttaaatcatatttcacataagatgagacaatgcagaaatgtacaataacagtgtgtattgctgcatccctcttccatctctatggcattctcaaaggccaagtgtctgctgtttgtccaacagaaagataatcaaacctatccttgtaattcacatgcctgtaaacatacaggattagtgttggaaatttttgttaggctgaaaaacatttgcctttctccccacagctacacatcaaggaaatacaacaaaacctaaataagtccaagtttgtgatgattccaacagttcttagactgaaagctatcttttcataataaacaagtcatgtttattatgaaaagcacattaacgcggcaaaacgcgattagaaagtaacaaatcttaaatatgtaagagaacagacatgcaaacaaagaagtctcatatcaaacaatcttatctagtcattaaagctggactttcatacaggtaaaaatctgtattgaaaatgagtgaactttaaacttagttatttaacataactgaaagcaagacagaactgtaaaatgatcatcttgaaaaagatatcccacagggtaagggtatgaattatgcagctgatctaaattcgtgaggtgtccttttctggtgtcatttgccctctccatcccttctccgcctgccttctttagctccagcatacacttttttttttttttttttttttttacttatatgtctttctccctctgcaagtaatagccagtattcactgggagtttactatgtgccaagagttttctaagcattgtacatacattaagtcatttaattgtcataacaaccctacgagtttagtattctctttagcgtctttttgcaagtgaggaaactgaggcacaaagccattcagggacaagcccaaagtgacacatcttatgctcctaggctgagggtagccaccattatcttgcttgcccttctggccccagagctggaaatttttattaggctgaaaacatttgccatttctcctcactggtacacatcaaggaaatacaataaaacctaagtaaggccgggcacagtggctcaggcccgtaatcccagcactttgggaggccgaggcgggcggatcacttgaggtcgggagttcaaggccaacctggccaacatggggaaaccccatctctactaaagatacaaaaattagccgggcgtggtgggtccccagtcatgctcgggagggagtaaggagcgggtttcaccacgctgtgatgctgagccttgacttgcctgttctaggtttcatgagctacatcgtggagccgctcttccgggaatgggcccatttcacgggtaacagcaccctgtcggagaacatgctgggccacctcgcacacaacaaggcccagtggaagagcctgttgcccaggcagcacagaagcaggggcagcagtggcagcgggcctgaccacgaccacgcaggccaagggactgagagcgaggagcaggaaggcga

SEQ ID NO: 2286 - DNA, 273 bp, Homo sapiens
ctctaggctgctaaacgctgtgcattgaaccttttctttagaagtttcagcgtaactaatgttagatgaaaattgttgatgcccctttctttttactttaaacaatgtggtagtgggagaatgactgtttctgccactatcaacctgatcctcatgctgatagaatgacagctagcacttatttcctaagtgcaactgttttagagatttttctcctaacatgcaaaggaaatactgattggcctataataagttcctatagggagactgagg

SEQ ID NO: 2287 - DNA, 18036 bp, Homo sapiens
agaatatgtctgtgctggagaatcatcactggcgatctacaattggcatgcttcgagaatcaaggcttcttgctcatttgccaaaggaaatgacgtaagtgctgccgagatgaaacatactgatgtgcatgcagtaaagataagccactttctctagggcaggcttgggaccttttgcgtgaatggcagagagccccccggctgtacttcctgcctgcactgagctgtctatcagaggagatttggtgtcagttacagcaacccagaaaccaaaatctctctgtgtgctttgaaagggccttgcagagtcaatgacctacagtcaggaaaagggataataaacagctctcagttttcacacgcttcagtatcagtgctcgactttgccaaattcccgacctttagtttagcaaaattgtccttccatgtagctccaaatagtaaatatttatcaagaaggaacccaggcattctaaagctagagttcaaaaaagtatattttgtaattgctagtctcagcaaaaatagaagtcagaaattcttttctaaaatgtcttttgctaagtaattgaaatggccctagcatttttttcaccaattaatttaccttacgtctcttgcactttaaacagaaggggagacactcattttctggttcactatttgatagccatggtatgtaggctgagtcccactaaatctgaggccattgtttcattttcctggtggccccaagttagctgctaatactgtcttccaaggccaccattaattctgatctgtttaatgaacacgtgcagaacccaagaaacctaggtgaaaagagtacatagattgctgtacccttcttcaagacaagcacataacttgaggtcaaggaccaagtgctgtctcccaactgaacaagcagtatactctgggttgtggattgattcctggccctctgatttgatctcatgctgtttcctagcacccagaggaatgtgaaatttgcaggaggaatttcagttctgataaatttttactccctggaactaaataaaaccagttctcgtgcatggaataaaaacttatgcctcttactagaataataaattgcaaagattgaaagaattaaatgcaaaaagaactaaaaactagagcaaaagatcaagtgagaagaagaaaagaggaggtaaggagagagacaaggaagaaagaaggagaaggaaaggaagaatagtgaggacaggaaagaagaaaatgcaagggaaatgggaaaggactctggggtgaccagacttctcctggtcagtacctgcattcatcctgtttgttactcaatatttctttcctaaaatattcatttcacatctatggattccaatgaaaaatatatttttatgtgtctttgtggaacacagtgttataaattgtttttgccagaagaataattgttatacaataatatatgtgaaaactttattacaaaagccattatcataatcattattattccttctatcacaggtaaatgctttaatgtcatttttctgattttaaaagtagggcaggttaattgtagaaagtaaggaaaattcaggaaagtgttagtttgaactatgtgaagttgctctttttaagggccaaaaacaggagacttttagcactttcatatgtttcagcttgatatgaaagagaaaactgaaactgctagtaatcctgccatccaggtatagttcatgttaacctggctagtttattttcttttagtcttttttcaatacaaacttattttaacaaaatatgattatatttggggaacttattttacagtttacgtcctgaaattttttatttacaataaagacttttttccaaatcattaaacctgttaaattaaaatgattttgtcagccgtatggcattattgtataccactactgcctttcatttggaattcaaatggtttccaatatcccaaactttgatactctgttttctcaggaagtatttgtagataaaaattattggtcagaaaggtctgaacttttaagtttcttgtatattatccagttgttcttctaaaaggctgtatctacctgtattccaactgatggattgtaagaaaatgtaccaatgtaccatcaccaaaattgagtttatttttatctttttaaaatatttgcaaatttgacatatatgtatgtatatacacaaatatatatgtaaagtggttttcattaaattagtatgcatcctttacttacaaccaagattgaaatttttcgtatatttgctgatcattgctatttctttagagaacacatttttatatttggtctcttcctattttcctatcagtgttattcatttgttagaactctttgtatattaactacagtaaccatttgttatatgtggtaaatattacttgaagtttttagtttgccttttgattcatgaaacatttcacctaattaaaataattttattttccaattataaattcagtaagtattcatatcttcaaagaattcatataattttgagaagtataaataaaatatcaaccataatcccattatagatcttttcagtttattttctgtgaccatagagatcatgctttacatgctttgcattttgtttgtagcattaaaaagatgacatttttcaatgtcaattactatagctgtacattgtacttcataattgcacaatatgaatgtaccatggtttatttaactaatctcataaatttttgtgatttttttcccccacggaatgcttcattattgtaaataacaatagaatacgcatccttgtaacatatctttactaattatatctttactaacatgttaatgttaatttgtagatggactgttggtcagattatttatgttcatcaaatgctttttccactaattcctaaattaccctccagaaacattgtactaatttatactccctaacaaagaatgaggggaaccatttttctcgtactattgatagcattgggtattacaatctttcaataattcagcaaattacttagcagttacttttaatcctcaccaataaaaatgggagaaataatatcacattgtggttttaatttgctttctgctatactaagaatatttaatatcactttattttttgagatattttgtatttctcttgtgaattttctgttttatataattttttatgttcagaactggattaaagatgtagtatggcttaaaaacaaaaatgtttgtggtgaaactataaagcttttagaatatgatgtagggaaattttcatcagagttgggaaaagtttcttaaagaggaaaaaaaaaactagccataaataaaaagatttatagattaagctacattaaaaattaagacttcctggtggcactgtggttcatgcctgtaatcctagcactttgggaggtggagatgggaggatcacttgaggccaggagttcgagaccagcctggtcaacatagtgaaacccccatctctatttataaatttaaaaataaaattaaaatgataaaaattgagacttcatcaatagacatcataaagacagctaaaagacaaaccacagacacaatatttgcaacacgtagctgacaaaggaccagtatttaaaatatgcaaagaacctcagaaacaataagaaaaagacaacttaatagagtagacaaaaactagagtagaaacttcacaaaagaagtacaaatggccaataaagacatgaaaatatgtctagcctcattagtaaacaaaattcatattaaaactacagtgagttgcatgacatgcccatcaaactagcaaaaaatgtaaagggtaagaatgtagaacaatgagaatctcatctgctactgctgggagcaaaaatttataccatcattttgaaaataattggcattatctagtaaattgaagataaacataccctgtcatccaattattgcattcccaaatatagaccccagggagacttctgcacatgcgtaactagaggtatataagaatatttactgtggcttttttcatagtagccaaacactagaaaaaactcaagtgaccatgaaaagtagaatggataatggaatggatttcattatcaatggaattttatacagtggcatacactgtaacaaaaaaggatcaactatagcctacacatcatgaaggaatttcaaaaacataatgtttagctaaagaagtcagtcactgatacataccatataacttaaagttcaaaagcagttaaaattaagttgcgtggtttatagatgcactcacaggtggtaaaatcataagtaacaagaaaattgttaaaacaaagagcaagaaagtggttacttccaggcttgaaaggaaaggggatgtgatgagacaggcaacatgacctctggggtactggcaggcagtgttcttgacctgagtggtggttacaaggtgttcattttctatttattcattaaattatgtatgtattccctatgcattctacttaaatatatttcatttttaaaggtaaattttacaaatatttatggattgttcctttattactttttatatgtgagggaaagctccaacttgctttacctttctaagatatcccattttctctataccatttgttgactaatatatctcttgcccactggtttgtaacagtgccttaattagtttttgtgtttgaagttccagaatctcttcctggcctatgtattgtgttccgttgatggatctttccatcccatggtaccctttactattattgtcttcatttttattactattgttatgcccttttctctctccgtgcacatcttcatgtttgaactctaaaaacacaccgccaatctcatgattctacaagtcttttgtgtcctccctaaaacatgcatttctatttggctttcagattttttcacccatagaaatgtctacactaccacaactttgtttttcaaggtttcaatcactttatacagttcttggcatgcttcctgtccaaggacgcaactggtgggtgggagacttgctctcaggcagtgaaggactggcacattgtgtaataaacagaatcaaaggcagaaattagattacaagccacctgatgatgataaaatcaatcaccctcatcaaagggatttgctttgtgtgtgtttttctctttcattcttgtggatgcagacaggatattgaacagcagctgggctccttgatcttggcaacagacatcaacaggcagaatgaatttttgaccagattgaaagctcacctccacaataaagacttaagactggaggatgcacaggacaggcactttatgcttcaggtaaacgaaacaataaaagccattctttttgctgagtgaaaacactcagctgggctgggtgtggtggctcacatctgtagtcccagctacttgggaggctgaggcatggggatcacttgagtccatgagttcaaggctacagtgagctatgattgcaccactgcactccagcctgggtgacagagtgagatcctgtctctaaaaaaacacaaaacaacaacaacaaaaatccactcagggccatgatcaataattttagcacatttgagaaggagttatctccgatggtatgagttagagcagtgacctattttagtaaaggctttgaaatgcatgaaagttataagtggttcccaactaagcaaaatctgggttttaggtcaacaagttgataaagctcatttttcttgttcagtaactgatttatcacagagtaatcccgctggatgcagtaaaggtctaccgcatttggtggcttggtataaaatcagctactgcaatacccacacattttaaaagactgtttctgaaacacaaaagcatattatattaactatagtacatacaaaaattggaaaacaagtgacctccctttaccttaaacctatttaacctgctttatttccttttactacctaaacttctattttcatctgagtcttaaacatttttatctggtcttatttttaggcagcaaaaaataaaattgaactgaattgaattacattggatcaagtccattcctttctgttttactccacggcaagaagccatttgtgacatgacaaattacatcagggcagagtggatgtcacaaataaaaatgtgacctggtatccaaaccagaaccttctttcttgatcttccattttctcttgtcttccttcttttcttttggtgcaaaaaaacatagtgaatggacctagactcatctagatagatgagatggagctacacctggagattgaatggtgcagtcttttttgttccaggctttcatgctaccctttgtagctgtccaaagtgctccatctttgccaggaaataccctactcccagcagtagaactatgactccttccttatttctttccaaactaggcttctagtccctgaatgccacaaggatcaaccaggtgtctgatttgagtgactaaagccaagttgtgaatagctgaaagatttggccttgaacacttgcatttcgaaagaaagccttgctaactcaaatgcattccttaaggcagaggctggaggaggcttctctgacacttacctctacttcaacatgtactggtacccccactaaccaggaaataaatataaacaactaaatttgcaagttgatatgatccaagggtcttccagaccccaacattgctatctgttctgtgatgccaaggaattgggtcaaaccaatggacactgctggtctcttggtagcaggtggtggttaaaagagaatctgcttctctgggaattcaaggtaaccctcatagggtcatcattactgacaaaaagctggcatctcagatccagaccagtgtgaagcaagtcaagaaggccctaatttagctgtgcaaacaaagcattcctgggtttgatacgacttcattccctgactggcagtctgagcttacacatgcagacataaatgccaacacacataatttaagtgatgtatggggtttgtcagtgtggctactgtgagagtgaggtccagatgacctcacttgagcctggccagggaccatgcaacctccctgcatgcaggaggtggagctacagaaggagccaggccatggctttccttggcctgcccacccaagtctcttccagcaagctccatgtccttggactgtggctcttctctcctcactgctataaagccagcattctcaatgcaggctttgtatcatggtgaataagtgcagtttcctgaagaggcatgtcagggaggtactctgtaaatatgggcctggtactgtgagcagactgaacagcttgatagcctctttggcttggggtgcttttgcaactgaaagaacatcctctcacaatttctccccgccctgtcatttctcagatcgccttgaagtgtgctgacatttgcaatccttgtagaatctgggagatgagcaagcagtggagtgaaagggtctgtgaagaattctacaggcaaggttagtagtgatccaacagctgagatttcattgccctgtcttcttttaggcatttatcctaataaaacaggaaatggctgatctatcatgacatttgttctctcatcaactcttgttatcctaacctttctcttttactctcttggaactcatccaaccctttttcggaaaaagttaaaaataaataacattgacgtattgacttactacagaaacaggtagtaatgaggcaaaataaaaatgagcaaaagtgggacattgattataaatggctctcctctgtggatataagaatgtgtgggatagtttgattttgactttgaccttcattttaatgagctgagtgcagcctaaaggctaaatgtcatttgaggtcaatgttttccactctgacagaaggacttagactccttttgtattccttctccttgctttcttaaaaaaaaaaaaataatgaaattggacacagctgaccaaaaagtgagttcttcctttcaaatatagtttcaacagtgaggtagaaggattttgctgtgaaaagacaaatggccctgaattagggtataatttttaaaagattaacctcattcagaaataaagcaatgaattagcaagcaggatcttgatgttgggtggggtatcaacctttaaatacagccttgtttcttcaggctgggtttcaatgtgcaggatgtttgttcaggcatcaacagtgccctcatgctagtgacagaatcaggtttgagaggctgagaacaaataaagcttgaagtgtcccacataccagctctgtggggaggtcaaatagcaacagtgagccttttggagaaggcaccattgaaagatgtgtcaatgacatcgtgatggccccaaagacagaagaattgattgagctcatgtggggccagaagtctctactcactgtatctttctctcagaataaaagtgctcatgtaactcctacaattctgtatataatttcacttgaattgagtaaaagtggttagaaatcaaaatctcagctctagttgcccctaaataaaatctccaaggaaggtaagacaaaaggaaacatgatgaaattggagctagggggctttaaattagatataatcaatattttctttactgtttgatatgttgaatattgaaatagcatagtgagagaggggctaagatctctgtccttgcaaatcaaacaatgaaacagaggaaagagtctactctagcccacttggttttgactcaatcatgcccagcatgattaaagtacacaagtcagcatcgactgcagtgtaaaccttttattttctcatcttgcaccttatttggattctgagcaccttggggcaggaccatgtcacttatgtagatagtaaggcccatagtgccagtaaatcaaagttgtcaactaagtacagtaaatggtatcaaccaagaaatgtaacctataagatctcttttcttgggcctggtgcagtggctcatgcctgtaatcccagcactttgggaggcttaggcaggtggatcacctgaggtcaggaacttgaaaccagcctggccaaatggtgaaactcagtctctaatcaaaatacaaaaatcagccgggcgtggcggcacaacctgtagtcccagctactcgggaggctgaagcaaaagaattgcttgaacccaggaggcggaggttgcagtgagccaagatggtgccactacactccagcctgggcaacagagcaagactccgtctccaaaaaaaaaaaaaaaaaaacccttttctcaaaactgcttattgtcctagtaatatatgcatgcattataagatggaaaaacctagaacatttgtaacactgatctctaaaggcaggcttccatgtaccttcctctggcatgtttcctggcagaggaagaatagaaagtatatctagtcctttttatttaatagccttatggtctagtagaaattctgcttgttttaagagaagattataggctgggcatggtggctcacgcctgtaatcccaagactttgggaggccaaggcgggcggatcatgaggtcaggagatagagatcatcccggctaacacggtgaaaccccgtctctactaaaaatacaaaaaaaaattagccgggcatggtggcgggcacctgtagtcccagttacttgggaggctgaggcaggagaatggcatgaacccgggaggcagagcttgcagtgagccaaggtcacgccactgcactccagcctgggtgacagagcgagactctgtctcaaaaaaaaaaaaaaaaagaaaaagaaaaaaaaaagagtagattccctggtcatccaaactgcctgtcctccctactgaattattatttttttaattctataaggatgacttgtgtcattttgatttatctttcagtttaagatttggactcatctcagctcattccagcctgctcctggcaggcaggcttccacagactactaactgtcctggacaaagtacctttaatgtgattcatgatgttaagcaaaggaaaacccttaaaatcaaggttgaggacacagggggaaaggaaaacaagaccccatgaattagaaaaactgtttcattctcagaacagagattaggactccaaataccatatatctccctcctctccccgaaaaaaccttaaaaaattagactttgtcctcttgtaactacagattgatatcatctcaacctagtttcctagaacattttattgaacatctgcttccagccttgtctaatcctcaacaaaactgattatcctatgtgcaaagccccattggagatattatgaagaatgcaaagaactacaggtagtctatgctttgtactctcaaagtactaattagtatagtttccagaggaaagaaactatgcaaatttcccctttatattctctacattggttagcaaagtgtctgaaacataaacgtgttgaataagtgaatgaataaatgatctaattggaaaacctctaatgatagtggtcacaggagaagatccagtaccttgaaaggtagaatctgagctcagttttgagtgatgtgcattgttctatactttccaatatggtaacaagacacatgtgactggttaaatttaaattaaaagttaataaataaaaaatagagttcctcagtcttgatcatatttcaaggggctgccacagtgggcaacgtagagaacatctccatcattgcagcaaatcccattagagagcgctggtctagatagaatggaatggaaaccactgaggccgggatgcaccctgccttgtagaccagctcagtctcatagaagataagaacgagaggattgtggaggcccctgggcaccaggctacagtagagaacatgacaatgggagttatctcagaaagtgcatttagggcaatatatacagttgaagtggaagaagaattggaggaagaaaactagctaagaagcaacaactaagaataaattatcaacacaccagaccaggttaaagcagagtgaaagggggcaaaaaaagttcttctaagagggagaaacaggatgtgaaacaagatttaagaggaagaaacaagcagggacccttgcagggtccccagccaggctcagatgagatggagggtgaagggaagggagaagtcaaagacaactcctccaaagtgtcacacttgactgaaaaatcactattaacagaattacggaggtgaggagtgaaactggctgtaggagagtttgtcttaatattatatggtgttctggcctgccctcagaaggctatgatcatctggagttgaagagttagggtggccagactgccctgaaccactcaggttaagcccgaatgatttcctcacttcagccttgaggattaccaggcacaagagaccccaggaggcagactacagtcttaaaatgacagaactgcagcctctgtagggcttcagctcaatggttaagtgcagacactttgaagccaaacttcctatgctggaatccaggctccccactttactagtggtgtgacctactagcaacatactgggtcagcatttaaccctccctgtgtctcagtttcttcatctgtaaaatggggattataataaggttgttatttggattaaattaattaacatatgcctgggaggggggctcacacctgtaatcccaatgctttgggaggctgaagcaggaggattgcttgaagccaggagtttgagaccagcctaggcaacgtagagatcctatctctatttaaaaaaaaaatgaacaaaacaatattagccaagagtggtggtacatgcctgtagtcccagctactcaggaggctgaagcaggaggatcccttgagctcaagcgttcaagggtgcagtgagctatgatgacaccactgcactctagcctgggtgacagagtaagagcctgcctcttacaaaaaacaatgacaattttttattaacatatgtaaaatgcttagaacgtgcctggcacacggtagtcactatataaatgttgtgtttttatctcttctactttagcagagtagattcataactgaaccttccactcattaaccagattgttttttccaacacaaaaattactcaatttgttatgctcaggaaggactgatgaagtatttcaataaagttttgtacaatacatttctcctttgatcttctattaggttggtgcaaatgtaattgtgggttttgccacggaaagtaagggcaaaaaaaacacaattacatttgcaccagcctgatagctgaccaaggcattaaaaaaaaacattttgagctgggtgcagaggctcacacctgcaatcccaacagtttggaagatggaggcaggaggatagcttgagctcagaagattaagactagtctggacaacatagcgagacctcatctctactaaaaataaaaatttaaaaatatacattagccgggcatggtggtgcatgcctgtagtccaagctacttgggaggctaaagcagaagggttgtttgagcctaggagtttgaggctgcagtgagccaagatcatgccactgcactcaagcctgggtgacagaatgagactctgtctcaaaaagaaaaaaagaaataccattctgacctttatactttttttcaccttcagttgcattaggtaaaattctaaggaatcagaatgggagattctgattaattttgtggttacagagtgaggtgctactcagatgagatctttctagtccttctacctcatttcctacctacttactgttcctggttgtcctcaggtgaaacaagactagggtcaggcagcgtgaaagtagaggagggagaaggaaggacaaaacctgttttcttaacctgtcacttaaagccataacttttatttcatgtgaggaaatttctcatttgttttcttgtttttgtaggtcttgttcaaaagtttattctagtcccagagcacacctactagcaataagccattatgaacggtcattggcactgtggtattttaaatttttacggaaactactgaagtaaggcagagcaagtcggtgctgaagggtccctaagggataacaagtcaggaaacagtaattcccagaataacttcttccgacgaggtcattaaaattattaatactcattttataagttctagattaccaatgtgtttttttctttctttctttcttcttaggtgaacttgaacagaaatttgaactggaaatcagtcctctttgtaatcaacagaaagattccatccctagtatacaaattggtgagttgaattcagtgttaattccaaataaatacctttggcacatctcacaaaagtgacaaagaaaagatctaaacacagctttcaaaagatcagcactggaggtttaatcaacatccttttgaatggctgagtccaaattaatactttaatcatgactaatctactagctaattatctattgagaacttatgaaacctaggatcgaagctttgttataggcccttaactaacttgtattattttaatttggtagtttagaatagaatcaaaaccaaaaagagtagaagaaaagtaacaggaatcaactattcatactctctgcagggcttgaaggtgggaatcagcagaatctgcctttaggacccttccaatctgggtcgctacccctcatccctaatgctcgctcccaagaacccaatctctaggcctagagcttgtgagccatgctatcccgccgcatcctgggattcccagtttcactagtccttccttcaaaacttattttcaggttattctcctaaaaccacactctctttcaagtgtcactggtgggaaactgttgaagtatgatgccaatgcatccaaaataattattgctttatctaattaagttatgcattagaccaagaagcaaatcaaactgtggaaattttaggcactttagcggaggaaatatttttgcttcggtaagactttctatcacaccttaagacactccatcacgtccacccacctttaaagcaagtctttcttttccttgcagttcccttccattgaatccgaactcagaactttaactcttttccttataaactctgaccctgacatgtaccagttcatgttttatacctgttcctatagacttcagacagctgaacgcattcacagtgctacagacctttgcaaggctcaaagtttaatgctttgacattggtagggaagggggtatctgaaaacataagctgaaaattaagaaaaccagggtaagttagaattacataatatcactgaaggtcaaatctaatccaccgtcccacagtggagtcataaaatcatcctcaggaaataaggacaaaataaatctagctataaagatttcaatggaatatacaactattaaaataggtatgttcgattattgagcatttttttttttcaaattgtccttaatattgttatgtagttttcacaatcaaaccaattcctccaccccaaagctgggagctggggatggtggcatagaaaaaatacaacccagaaaagataatacagagttgctgggtggcttgcaagggaatatcagcaacagaaatgcagcctcagcctcctgggaggcaattctctcctatcaattgccttagccatggaggttctgcagacgtgattcaaaattagatgctaaccaaagtcctaatcctgaggctccctgtgttaagctccagctggaaagaaatttaccaggcaactgtcaatgacattttgaaccccccaaacaaaaggactcacgtggttcagcacacaacctggatttgtgagacagacctgatttcagagattctgtcctgttgttgtcatgagaacacacttattttgtcagatcatatgtcctgattttcagctcaggaaaatgtggttaccatagatacctcttttaaaaaggggctgggggttgagtgaatagggaaatcctatggatgctacaccagcacaccaataataaagagaaagggaaggtgattataaaacaatccttagtacatagatctttctctgcctttgctccacatctgccagctcgtagaggttgagggttgggaagtggggtggcagggacagatcaggctaagccagaaaaatccaaagagataaatggaacttggtggatgctacaggctctagcccccaagacaacaatttttccagtgggtcttcagtaatgcagctatttcctctgtccttattcctctctgactgaaatgttcccctgtttttcctgcctcaatccaaaatgagaattttctgagatctactctcaggcttagatctgatttttctttttaagtaatttatatctacccaagtggaactagggcttaatatctcctccccaactccacgcttccctctctctaccaaattctacattttaaaaggaagatattagccaggcggggtgactcatgcctataatcccagcactttgggaggttgaggcgggcaaatcccttgaggccaggaattcaagaccagcctggacaacaaggcaaaaccccatctccacaaaaaatacaaaaaaataaaattagctgggtgtggtggcatgtgcctgtagtcccagctactcagaaggctgaggcaggaggatcacctgagcccaaggggtcaaggctgcagtgagccatgatcatgctactgcactccagcctgggcgacagggtgagaccccatctgttaaaaaattaattaattaaaacaaaaaaaggtattaaatcaaatgaagctctaattggtgaaatctatagaaggctaaagagaaagaggttttccttcaatccttgtctactctgaggctaccattcctccctactcccccttcctccccgcaaccccccgtcaccccaccatccctccaggaggacaacagcccagcaatgtcagctcatcccttgagaaaagggaggttggcagaacacactgatggaacaggtttccaaatctgataatgtggaagccttccttaatttgaaaaactgcctcttggtgtctattcagactttaaaatcagtttcctacctagcataagaagtctttatatctgaaagtataaatacagatatagtgccagggtcacttaagaaaatgaggcttttctttttttcgagttggattttaaaatgttggatatttaacttttttatactgagataaacttgataaatattcacactttgaacttcagaatagtataattttgcaaagcgtctttttagatatctaatatctcatctctttgaaggtgaatgatattagaaattaaatatggagattgtggaggaggtaaagaaaattcaagaacagcaagcaaaacgtgaaatcctcatctgctgacaccctgtacaaccttaccaaaattccaaatacagacatcaagtcactggtttaactttccccctccagttcaggttctctactatgatctcacaatctttaaatcatatttcacataagatgagacaatgcagaaatgtacaataacagtgtgtattgctgcatccctcttccatctctatggcattctcaaaggccaagtgtctgctgtttgtccaacagaaagataatcaaacctatccttgtaattcacatgcctgtaaacatacaggattagtgttggaaatttttgttaggctgaaaaacatttgcctttctccccacagctacacatcaaggaaatacaacaaaacctaaataagtccaagtttgtgatgattccaacagttcttagactgaaagctatcttttcataataaacaagtcatgtttattatgaaaagcacattaacgcggcaaaacgcgattagaaagtaacaaatcttaaatatgtaagagaacagacatgcaaacaaagaagtctcatatcaaacaatcttatctagtcattaaagctggactttcatacaggtaaaaatctgtattgaaaatgagtgaactttaaacttagttatttaacataactgaaagcaagacagaactgtaaaatgatcatcttgaaaaagatatcccacagggtaagggtatgaattatgcagctgatctaaattcgtgaggtgtccttttctggtgtcatttgccctctccatcccttctccgcctgccttctttagctccagcatacacttttttttttttttttttttttttacttatatgtctttctccctctgcaagtaatagccagtattcactgggagtttactatgtgccaagagttttctaagcattgtacatacattaagtcatttaattgtcataacaaccctacgagtttagtattctctttagcgtctttttgcaagtgaggaaactgaggcacaaagccattcagggacaagcccaaagtgacacatcttatgctcctaggctgagggtagccaccattatcttgcttgcccttctggccccagagctggaaatttttattaggctgaaaacatttgccatttctcctcactggtacacatcaaggaaatacaataaaacctaagtaaggccgggcacagtggctcaggcccgtaatcccagcactttgggaggccgaggcgggcggatcacttgaggtcgggagttcaaggccaacctggccaacatggggaaaccccatctctactaaagatacaaaaattagccgggcgtggtgggtccccagtcatgctcgggagggagtaaggagcgggtttcaccacgctgtgatgctgagccttgacttgcctgttctaggtttcatgagctacatcgtggagccgctcttccgggaatgggcccatttcacgggtaacagcaccctgtcggagaacatgctgggccacctcgcacacaacaaggcccagtggaagagcctgttgcccaggcagcacagaagcaggggcagcagtggcagcgggcctgaccacgaccacgcaggccaagggactgagagcgaggagcaggaaggcga

SEQ ID NO: 2288 - DNA, 273 bp, Homo sapiens; identical to SEQ ID NO: 2286

SEQ ID NO: 2289 - DNA, 653 bp, Homo sapiens
cagaaccacaccttcatcaagcggtccgaggtggaagaagtggattttgccggctggttgtgtaaaacctgcggtgaaccagcccggcacacccacgcgcaccgccgtgtgacagtggccgggctccctcggtcccgctggtgacctgcccaccgtccctgtccatgccccgcccttccagctgaggaccgtggcgcctccacccaccctcctgcctcaccctgcggagagcaccgtggcggggcgacagcgcatgcaggaacgggggtctcctctcctgccgtcctggccggggtgcctctggggacgggcgacgctgctgtgtgtggtctcagaggctctgcttccttaggttacaaaacaaaacagggagagaaaaagcaaaccgcgccatcctgcttctttcttccgttcggcgttgggtgctgggctttgcttcagcccagcacggagaggacatccctgagctgacccgcatcgccgggcgccgaggctggagggcgcagggccctcccttagggagagctcgcctctccctttgggtcaagggatgaagacctgcagtgagcccccaggcgatggcggctctcgccaaaaggaaggagagtgaggctgggggcggcggctcatgcctgtcattccagtgctttggg

SEQ ID NO: 2290 - DNA, 397 bp, Homo sapiens
aggaacgggggtctcctctcctgcccgtcctggccggggtgcctctggggacgggcgacgctgctgtgtgtggtctcagaggctctgcttccttaggttacaaaacaaaacagggagagaaaaagcaaaccgcgccatcctgcttctttcttccgttcggcgttgggtgctgggctttgcttcagcccagcacggagaggacatccctgagctgacccgcatcgccgggcgccgaggctggagggcgcagggccctcccttagggagagctcgcctctccctttgggtcaagggatgaagacctgcagtgagcccccaggcgatggcggctctcaccaaaaggaaggagagtgaggctgggggcggcggctcatgcctgtcattccagtgctttggg

SEQ ID NO: 2291 - DNA, 169 bp, Homo sapiens
gccgcagtgggctgcagatgaaacggtgagggcttgtcctggggtcttcggggttcccggaggcccatcgcctgcttctccggttgtccgagatccaaagcccagcctttctaccttcgggactgtgtgctcggatagaggaggccacctctgggctaggtgtggtggg

SEQ ID NO: 2292 - DNA, 11869 bp, Homo sapiens
ggacggcggctccctggaccaggtgctgaaagaggccaagaggattcccgaggagatcctggggaaagtcagcatcgcggtgagtccaccgcagacccacatcgcgcccccaccgcactctgcacggacctcttccacacggccagggttccgggagccactcacagtgtggtgggggttagggtggcccctgcagaaagagagtggccaaggctgtgcccacctgctgtggagcttgaacaagtgacgtcccttttggggcctgaggtcaccatctgccaagtgaagacgttataggtccctcttcactcttagtatcctctgtttgccacactggtcccctctgcccctcgtggcagggggatgttggcagctggcacgttgcaggggacaggagcttgttgaaagggagactctggggtgggatgtgggacgccaggacctccagacacactcaccattgctgttagaaatgtcaccggggccaagggcgtctctgctgcccggtctccagcacagctgctccgtagagccgtgtggtttcagcagaccgtgcgtgttgcttcttggagcttgcaccttgtccatagcaggggccgagtcccgcctgcccataccagtgttggattaagacacaggacgcatgctgccagacacgcgtttccgagttgaaagctgccgtcacactgcctgtgctgcttgcttcacttctcgggatgctgcttccagggcgggcctgggggaaacatcgtccttcccaggcacccttagcccgtcccatctgggggcccttagcacagtccctgggaccccagatgctgcctttcaggctgatgtgggcaaactcggcagcccagcctactcccgggccatgggccaccatctcagcttccctggggctaagccgtgtgctctgaatcaaaggcagtagtggcatcggcggcactgcggccatgggaaccggggttgacttgcacacgccagcacagggctgtcagcactgtctcgtctctggcctcgcttgctccaccccagcgagctcctcacagcctgaaatggttcctgccgcagctccctcgctccagctctgactgctcagctctgacccccgggctcggtcaggagctaagccctggtggccttgtcccgtgactccctccgcgctcccctgcaggttctccggggcttggcgtacctccgagagaagcaccagatcatgcaccgaggtaaggcccagcccgccctccccagagccccgggggccggcaggcaactgttgggcgcccctcacccgcagcctgccgcctccagatgtgaagccctccaacatcctcgtgaactctagaggggagatcaagctgtgtgacttcggggtgagcggccagctcatcgactccatggccaactccttcgtgggcacgcgctcctacatggctgtgagtccccgctggctctcccctccagctctcctccctgctgctctcccccaagctctccccacccagctctgccagccagctctccccctcagctctcacccccatgtctcctgcgcagctgtccctcccagttctcctgcgcagctctccccgcctcccacgaggctttcccaactatttcgtgggcacacactcctacatggctgttagcacccccgggacagtcccaccccagctgcaccctccccttcatcagctctccccacttgccacaaggcacgtctaaagctggtgcctcctgggagcctgcttttcggattccccttgctctttattttttatttgttaatttactaatcttttgtagacacggggtctcgctgtattgcccaggctgctcatgaactcctggactcaagtgaccttctttcctcagcctcccaaagtgctgggattccactagcagtgagcctgagccaccacgcccggccagatctccccttcctgttggaattctctcttaggtttttgtctctagcagtgcctaccaggtttctttcttttttttttttttttttttttttttgagacagagtcttgctctgtcacccaggctggagtgcaatggcacaatcttggctcattgcaacctccgcctcccacccgggagcaattctcctgcctcagccttccaagcagctggggctacaggcatgtgccaccacagctgggtaatttggtttttgtttttgttgttgttgttgttttttgagacacagtctcacactctcacccaggctggagtgcagtggcgccatctccgctcactgcaagctccgcctcccggattcacaccattctcctgcctcagcctcccgagtagctgggactacaggcgctcgccaccacgcccggctaattttttgtgtttttagtagagacagggtttcaccatgtcagccaggatggtctcaatctgaccttgtgatccgcccgcctcggcctcccaaagtgctgggattacaggcgtgagccaccgtgcccggcagccttggctaacttttaaaaaaatgtttttagtagagatggggtctcgccatattggctagcctagtcttaactcctgggcttccacctcaacctcccaaagtgctgggattacaggcatgggccactgcacccggcccttagttaatttctggaccaaggaattggaatctggggtctttcaggaaacgactggggattcagcaacctgccaaattgagccttggagcagcctctgagatgttagctgtggaggaggaggcccctgcttcctggggcccatcatccattcccaaaagtgctgagcattgcaggctcttcaagagctgcggtcaacaccagctccaggcctcgggctggaagcctcttcagcaagtgccgcagggaggccctgggtgggtgagccgggaggtagaattgcgtaacagctctctatccattgctgcggtcattagccatggagagggtgacgggggctgtaacggggcaagcctcccgggttccagctgccatcctcgcccctctgggctctttcctccctggctctgctgcagccggagcggttgcagggcacacattactcggtgcagtcggacatctggagcatgggcctgtccctggtggagctggccgtcggaaggtaccccatccccccgcccgacgccaaagagctggaggccatctttggccggcccgtggtcgacggggaagaaggagagcctcacagcatctcgcctcggccgaggccccccgggcgccccgtcagcggtacggcctgaatctgcaacttccggtctggacgcgcagtgccctgcgcggggcctgctgtgccagggtcagcagctgcctcccctctgcccctggcgcaccacctgtccccctggatggtgccgactgtggtcagcagtcctcccatggtcctggggtttccggggacagagctggaagcagtgagcaccccaaacctgttctgtccggggcagctgcacctgttgttgccagctggagggatctgggagcgcagctttgccaccaagcccctgggcagttggattttccaacattttatcccgaaagcattcaaacgcacagaaaagtggaaggaattggccgccacagagcctgcattctgcaggtgacacgctcctgtgctgcgggccaagccttccagggagtcctgaagtggagattggacttggcatggccctcagtggcctgttggctccggccccaacacacacaggaggggacacagcccgggagggggcgggagggctcaggccccagggacagctgggctcgcagaggacaatccggcacttagggcgggcacctcgggagcgggagctccctgacgccagtcagagagggccgagcggacacttccaccgcctgagggaagagccgggggcggaccctgcttggtgcagaatcacaggagggtcctgtgattttttttaaagtcagacatcagggagagttggtggcgtcagaccccaaaggaccctgtagcggactgtggttggttttaaaaccatgtttccgaactacaaagcacacaccccacaactcatttcaggtgagcagttcagtggttttcagtcacagtgctgcgccccatcacctctaattccagaaccttctcagctccccaagaggaaaccctgtccccatcagctgtcactctccatccccttcctgcctctggactggcctgtcctgggcatttcacagaaatggggtcacacacttgtgtggccttctgtgttttgtgtgtggcttctctcctggagcgcagtgtcctcaagggtcatccacgccatggtgcgtgtcagagcctgggtccttttgaaaggctgagtagtattttatgacacgaacaggccacgttttgtggtcctacccggatggattggggctgtgagaaggagattttcatagcactggcaagcccacctcctcctctccagccagactgctgggatgtcttgatctcatcccagggagaggcccccaagtccttatcctcaggcctagcctcagcctctcccagtcccaactctcaggtggtataccatccccagcccagggccccagcccacctgcccatttcaggacgggcagaaggcgaaagtccagctgccaagcccaggcctggccagctggttctcagacaggggtcagccacccctagccagtctcccgtcctgagtggcacttggggcctgcccccatcaccgccagcagctccatgcaaggtcacgcggctgtccttgcctgcggtcagcaccgtccctccccctgccctccagagaggaggggtgatgactttggcacgtccggcaagcctcaccgagccaaatgtgtgacttctcaaaaaatgttcttgttccttttgccttttttttaattcactagaggctcaggcaaggagtagctgtcccagggaatggaacccagagtcaggcaggggagctttgtccagtgcctctgcacacccgcctccaatttaggctggcatgtggaggagggcgcctggtggtgatcagccccctgggagcccaacccccagcagaagtgaggtggccatcggcccatctcacctccatctctctccctgtgcaggtcacgggatggatagccggcctgccatggccatctttgaactcctggactatattgtgaacgaggtttgtgcttgatgccttttggcttttcttttccttttctttcttctttctttttttttttttttttttttttaggcagagtctctctctgaccagagcaagagtcaccaaggctggagtacagtggtgccttctcggctcactgaaacctccactttccaagctcatgtgattctcgtgcctcagcctcccgagtagctgggattacaggtgcgcaccaccacacccagctaatttttttttttttttttgagacattgtctagctttgtagtgcagtggcttgatctcagctcactgcaacctccgcctcccaggttcaagcaattcttgaaccaattccacgtgtgtcgcgtctcccatcttctactgtgctgcacaagcccagctccttcccaagggcattgtttttttatgaagacgaacccagaattcccaccgcagcctctcaccctgagtccagagggaggtgtgtgccagcagccctgggctcaggccgaggagccagcctgccccttgagcagtggcccagtgtctctgcatcagagcgtcctggcgcccgtgggcgtggactcataaatcaccccgcttccacggagaaaggtacaggaatggcccttgcctcttggaaggaggcccagagagcctagaaggacctgtaggtcccggggtggctcctgctccgtcagtccccataacaacccagtgagccacagtatgagggtttccaccgcccagatgagtaaaacaaggcacaaggagggacgcggcctccttccaggcctgcagctgtcagggaggcacaggactgcaccccaaggtcctgttggccacgtgaccaggccgggccacctccctgggccttctgtgggtttctgtgtctttggtggccctttggagctggggcagagaaacgggcatttgagctgcctgcagactgggctaggcctggggttgggtggcgagatgatgacggagccaggtggggtggccctggtgacccagctctccctgcacctagcagccacacccatgcccagtgagcacatcccccgacctctcccccgcctcttcccgcccctgcccctgcgcgggaaaggcctgcccctgccctgctggcaccgcttacacggccactcccgctccggggacgtgtgtcaggccaggctccccagtgcttgggcttaaaactgtggacccagtttggccgggcacggtggctcaggtgtgtaattccagcactttgggaggccacagtgggtggatcacctgaggtcaggagttcgagaccagcctggccaacctggtgaaataccgtctctactaaaaatataaaaattagccaggcgcagtggtgggcacctgtcatcccagctactcaggaggctgaggctggagaatcccttgaaccccggaggtggaggctgcagtgagccaagatcacgccattgcactccagcctgggcaacagagcgagactgtctcaaaacaaaataactttggatccagatgtccctctgtggggcccagtcccaaagctcatccttcagccagtgacactggggaaggaagcaagtgacgacactcgagaggttgtcctgttgataaaagggggacgcaccccactctttccctctaagcagccgtgactctcaaacgagagctttcgggagaaggccacctctgacagggtgcagcccagttggcatgtggtgtcggccaggcctgcagggtgggtgaccggacaggacagtgaggggtagagagggctgcagccgagggtccctgacgatgcccagggctgaccccaccctctgttctcctccacagccacctcctaagctgcccaacggtgtgttcacccccgacttccaggagtttgtcaataaatggtaggtggagccgggctgcccacacccctggccgggacccagatgtgccactccttccgggtcctgggtggggcccgtggcccagcctgcccatccagaatcccagtgcagcgttaggcaggactcagcccaacgggaagccagattccttttcccagagctgtggggctgcagctcccggctgccatgccatcctgtccgtgagcccaggggtgaagcaggattgcaggccctgtgcacatgacggtgtccccagctcactgtctgcagcaggagaagcctctgtctggtccccggacccctggtgtgctgactgtgggctccccgggatccgcccgcaggttctgggagggtcgccagccccactccattctcctgcccccaagcacccagcagcacctgtggcgtgggcttcacaggcatgtgccgcagaccacggggaaggagctgcggacaccccgctgcccacagggccggtccatgtgtgtgagctcgggacgccgtggaacggcaccgcactcctggtgccggagttgccccgggcccttggcgtgcgctccggcgatgttgccccgggcctggggttttattagacagttagctggggttgcgtccaggcttctgacccaccaggcggggtttcccaccctctttccctctcaccctcccgctggggggtgtcctgcccctggcaccaaagtgcagaggtggatccctcgtcctctgccaggaggcagaacagagcagccactctgtgccactctctctggtcggagagatccaggccccctccgaccacggcccacacgcgggtgccccggggccaccagctgactgccctgtcttgtctcctccaccgcctcccggtcctgcctcttggaacccccagcctcatcaagaacccagcggagcgggcggacctgaagatgctcacagtgagtgatgccagcgggttctgggaccgggagggtgcaggctgccacccaggccccaggaaataaggctgctgggcctggccctgcccggggagccagcacctgcgaccaggatgtgggcaggccgggtgtgccaggccacgccgaggaccctctgtgggtctctctcatccatgagagaagccatcctgggctggctgcggggagcagagggtgtgtgcgtgggaacagctctgggctctgagctccgccgctcctgcctggtgctggtcccgcacccacaggatgagaccccgggcttctttgccctcatgagaggctggaggcagctctcagccccccaggctcctttccctgcaaactagagggtgaccatccctgttctgcacactggcaagcaggtcccccgaggccgtgcgtacttcggtgtccccttaaacccccatcctctgatatcctcggaagcccagctgttcaccaaaactcgcctccccagcggggactacaccctcagaggagggccccgggcatcatcctcctgccctcagcccagcctgcatcccgagtgctttcccataccacagccaccgtcagcgaccttcaaacccctcgacagctgattggcggattggagatgccacccccctagacagcccgttactttctgtgcctgtaagaaaagaagagatgccagctacagacacccaaccgggtgccttctaatactggaatgtggctttcagttttgtttttttcttgagagtcggacagagtctcactctgtcgcccagactggagtgcagtgaagcaatctcagctcactgcagtctcagcctcccaggctcacacaattctccagtcagcctcccaggtagctacgattacaggcacccgccaccacacccggctaatttttgtatttttagtagaaacaggctttcaccatgttgtccaggctggcctcaaactcctgacctcaggtgatccacctgcctcagcctcccaaagtgcagagattacagatgtgagccaccgcacctggtcaaaaaaatttttgagatacagccttgctctgtcccccaggctggaatgcagtggtgcgattgtagctcactgtagccccaactcccgtgctcaagtgatcctcccactcagcctcctgagcagctggggctaccgatgtgtgccaccaagcccagctagtttttgtgtgtgggttttgtttttccccgcaaagatgaagtctcactcttgtcacccaggttggagtgcagtggtacgatctcggctcactgcaacctccgcctcccaggttcagggaattctcctgtcttagcctcctcagcctcctaagtagctgggattacaggtggctgccaccacgcccagctaatttttgtatttttagtagagatggggtttccccgtgttggccaggctggtctcgaactcctgacctcaggtgatctgcctgcctcagcctcgcaaagtgctgggattacaggcgtgagccaccgtgcccgacctgcccagctagttttttttatagagacagggtcttgctaattgtccaggctggtctcaaactcctgggctcaaatgattctcccaccttggcctcccagagggctgggattacaggtgtgagccactgcacctggcatgtgtgactttttttcttttttaatgaggcaggctgggcattgtggtgggcacttggaatcctagtgccatagggggatggctctctgaggccaggagttcaaggccagcctgggcaacatggtgagactgtgcctctccaaaataaataaataactaaaaagagaggggtactaatgttgaaataactttttttttccctcagacggagtcttgctctgttgcccaggctggagtgcagtggcgcaatctcggctcactgcaaactccatcttccaggttcaagcggttctcctgcctcagcctctcgagtagctgggattacaggctcgtgccaccacacccggctaatttttgtgtttttagtagagatggggtttcaccatgttgaccaggccagtctcgaacttgtgatccacccacctaggtctcccagagtgctgagattataagcatgagccactgggcctggctgaaatagccatttttgaaccagcttcttaaaaatgctcccctgttgggtatcctggacctagccaagatgtgtcctatcaagttggttggtttttcacccatacctacaccgacttttaggaagataggcaccttggcctgcctccagctgcaaaagaggcagcattcaggggcccaaggtcctggacaccaccctcctgggaaccccaaaggcctctactcacccactgtggggtggcccagcacagcctcttccccaagggcacccgccctcctcccccagcccttccaaccaagaggcttctcatgttgtgctgtcctgtacaggaaccgctggtcacacgtggctgttgaagtgtgttcagtggggccgggcacagtggctcacacctgtaatcccggtactttgggaggccgaggtgagcggatcatttgaggacaggatttcgagaccagcctgggcaacatggaaaaacccggtctcaactaaaaatacaaaaattagctgggcatggtagcacgcacctgtaatcccagctacttgggaggctgaggcgggagaattgcttgaacctgggaggcagaggttacagtgagctgagatcataccactgcactccagcctgtgcgacagagcaagactgtctcaaaaaataaaaattaaggccagttgcggtggctcacacctataatcccagcacttcgggaagctgaggcaggaggatcatttgagttcaggagttcgagaccaacctggccaacatggtgaatccccgtctctactaaaaatacaaaaattagctgggtgtggtggcacatgcctgtaatcccagctactggggagggtgaggcaggagaatcgcttgaacccgggaggcggaggttgcagtgagctaagatcacaccactgcactccagcctgggcaacaagagtgaaactccatctaaaaaaaaaaaaaattaaagtaaaagtatttaattaatttgttaaactgaaataaaattgaggcttttgttctcaagccatgggagccacagtccaggggctctggagcctcatgtgctggcgagtgggacggtgcctgtacaatgctcttcgcggagttctgtggaacagcccgttcttgcctgggctgtcctgctccgggggaccctggcaatggctgaggacattgtggtgtcacgacttggggaagcccctggcatggagtgggtggaggccagggacgctgctcagtaccctgcagtacccaggatggccccacgccagagaatgatccggccccggtgtccacagcggccggaggaccctgggcttgcgcgagcgtagaccctcccctgggagcgcaggctgccgtgctggtggtgtccccgccccaggtggagtgcagcatcctgagacccctcccaggcctggcacacgccgctgcccctttctgggtttctttccctctcctaccccgagtgcgtcttcctgtggggaagggagggtctcctctgttttttgctttctgtcccgtaccatctgccagggctgggcagacgctggccctccccgtcctactgtgactccaggcccgggtgctcacggctcccctttccttgcagaaccacaccttcatcaagcggtccgaggtggaagaagtggattttgccggctggttgtgtaaaaccctgcggctgaaccagcccggcacacccacgcgcaccgccgtgtgacagtggccgggc

SEQ ID NO: 2293 - DNA, 112 bp, Homo sapiens
agggtgaggcaggagaatcgcttgaacccgggaggcggaggttgcagtgagctaagatcacaccactgcactccagcctgggcaacaagagtgaaactccatctaaaaaaaa

SEQ ID NO: 2294 - DNA, 169 bp, Homo sapiens; identical to SEQ ID NO: 2291

SEQ ID NO: 2295 - DNA, 419 bp, Homo sapiens
ttaagggctattgactgacaaacacacccaacttggcgctgccgcccaggaggtggacactgggtttctggatagatggttagcaacctctgtcaccagctgggcctctttttttctatactgaattaatcacatttgtttaacctgtctgttccatagttcccttgcacatcttgggtatttgaggagttgggtgggtggcagtggcaactggggccaccatcctgtttaattattttaaagccctgactgtcctggattgaccctaagctccccctggtctccaaaattcatcagaaactgagttcacttgaaggcctcttccccacccttttctccaccccttgcatctacttctaaagcagctgttcaacagaaacagaatgggagccacacacataattctacattttctagtt

SEQ ID NO: 2296 - DNA, 202 bp, Homo sapiens
gctcacacctgtaatcccagcactttgggaggctgagatgggcggatcacctgaggtcaggagtttgagaccagcctggccaacatggtgaaaccccgtctctactaaaaatacaaaaattagctggatgtggtggcactcacctgtaatcccagctactcaggaggctgaggcaggataattgcttgaacccgggaggtgg

SEQ ID NO: 2297 - DNA, 355 bp, Homo sapiens
aaaaataaaatggatttcccagcatctctggaaaaataggcaagtgtggccatgatggtccttagatctcctctaggaaagcagacatttattacttggcttctgtgcactatctgagctgccacgtattgggcttccacccctgcctgtgtggacagcatgggttgtcagcagagttgtgttttgttttgtttttttgagacagagtttccctcttgttgcccaggctggagtgcagtggctcagtctcagctcactgcaacctctgcctcctgggttcaagtgattctcctgcctcagcctcccgagtagctgggattatcggctaattttgtatttttagtagagacagatt

SEQ ID NO: 2298 - DNA, 424 bp, Homo sapiens
aaaagtaatcaataataaaaacaaagccttaaataatgatactaccactcccactaaatgttctgtttcatcttaatagagatacagcttattgctttccataaaaagtagctgctaacaagaaaaaagaaaaagaaaaacaaacttactataaaatcttgaactaatttagtgaattaccttcactacatagagaggccagcccttccctgcctgtaatgtaaggaggtcactctttctactttgagggaagatctctccccagcctcctcaaatccatagtaaggagtagtttcttgaatcctgggtgcattattttttatgcccttcaggcttaattattttacctaagaacacaaaatgctagcattgaatatcacttaatactattcactatctgagaagataaaacacctccctcttt

SEQ ID NO: 2299 - DNA, 424 bp, Homo sapiens; identical to SEQ ID NO: 2298

SEQ ID NO: 2300 - DNA, 424 bp, Homo sapiens; identical to SEQ ID NO: 2298

SEQ ID NO: 2301 - DNA, 475 bp, Homo sapiens
gagagatttaaaacatttagcatataatagcagttgaaaattaaagaaaatttttagagttttttgtggtttggaaaactttcagtaatacttttatgttacatggcattttaatatatcaatttagctataactttggaaactaaaattttaagtttttgctctggaaggagcagtatcgtttctttccagaaattctggtgggtaacttgataatttgacactagaaataatgggacaagaaaaacagcctggtttgacagagaggcccattttaacttttgttggtattcactagggtttctcacataagtacatgtgataacttttaaaatgtccaatactggaaaaagcagttttgagagctttaaagtgttagctctcacttaaatatcctgaaatatcctcctgagatggcttgctaattcctagagtagttccctgcctcacactctgtcaatttgggaaattaaaa

SEQ ID NO: 2302 - DNA, 156 bp, Homo sapiens
agaatattatccacatgttaaaaatgaaattatagaaaaatatttattgacatgggtaagtgtttacaataaacagtgttaaatgaaaaaaattaaatcaaatataccatatgatcctatttttacaaaaatgtacatatgtgattatatacatgc

SEQ ID NO: 2303 - DNA, 475 bp, Homo sapiens; identical to SEQ ID NO: 2301

SEQ ID NO: 2304 - DNA, 156 bp, Homo sapiens; identical to SEQ ID NO: 2302

SEQ ID NO: 2305 - DNA, 156 bp, Homo sapiens; identical to SEQ ID NO: 2302

SEQ ID NO: 2306 - DNA, 475 bp, Homo sapiens; identical to SEQ ID NO: 2301

SEQ ID NO: 2307 - DNA, 993 bp, Homo sapiens
gctgatatgaatcccagaaaaaaatttcctgtttttaatgttcttttcaatcccatctagataatttatagaaatataaccctaattggacatgtggtacaggatctataagttgctgtgtttttttgttactctgtattttgttccttttggtaaggtgaagtgtgtccaaagagttacttgcaacagtctttcatgatatgaggatgcccccgtattaccactctgattatagttctgagttctttgatttactcatgctgcatgacaaaatgtttactaataacaattcattataaagttatatccctctttacatcacttatctttctcactgaggttcattcactggaatttactcacgcaatctcagtagagtacaacgtagatacagaacctaggagagtcaacatctggaggattttagtctttcttacacatatgtgtgattttaaacgaatattctcagaccacaggaaactcttcatccccctgttgtttaccagtaacagtatatcacagacctttccaaatgtttgtatatgtaatcagatgtacatttatattgaaaaacaaatgagatggacttaaagagcacatcctgataaatactttctctctcacctgtactatatttctattagactaaagttatgtgattttttttttacattttttcagatgactagcaattttgatagtttataagataatgcaaagaactttctctgacaaactaactgcagtaacagaaacctttcttttcagttactctttttcaagaatgaaagattattatacaaaaaattgtatactacttgatggaaccaactttgtacatcttggccatgtcactggtcattgtgtgaaataaagataatctggataatgactattagtccaatgctaagaaacatgatctttgctcattaaagagctaaaatgtttattgctgttttgtctttcttttttctaaaaaaagaaaaaaaagaa

SEQ ID NO: 2308 - DNA, 993 bp, Homo sapiens; identical to SEQ ID NO: 2307

SEQ ID NO: 2309 - DNA, 1424 bp, Homo sapiens
caacaactaaagtgccatcaactgacatcactttcagacctacgagaaaaaattctgtacctgtcacgtcagcctttcccactgccaagcaggatgatcccaaacaacaaccaagtccattttcagtggatcaaagggactactcaacagagctgagtgtcactattgcagttggagcatcactgctgtttctgaacatcttggcctttgcagccctgtactacaaaaaggataagaggagacatgatgttcacaggagatgcagccctcagcgcactactaccaatgatctaacccatgcacaagaagaggaaatcatgtccctccaaatgaagcacactgatttggatcatgaatgtgagtccattcatccacatgaggtggttcttcggaccgcctgtcccccagattacacactagctatgaggaggtcacctgatgatgttcccttaatgacacccaacaccattacaatgattcccaacactataccagggattcagcccttacacacattcaatacatttactggaggacagaacaatactctgccccatccccatccccacccccattcacattcaacaaccagggtatagccagataagagaaacaaactattttttttgatggattgcagtaaacgatcactgaagattccttggctttcaacctacaagacttactatttaaataaggaggaatattatgtgaatatacatatcaagaactttgggggttttgaaaaaaatgaattgtatatatacaaatcaactttaaaaacaaatttcaattgcttgaagcaattgttctgaatgatactttttcattcacattcaagaattaattttttgaagatttaagttacataatggaattaggcatgtggaacaccaaacaggaaagaactatgtctgaaatataaaaaataaaaataaaaaaacaactatgaatatgcacaagggacacaccagtggaatgtcagataattttcaccagtttttatttggagccgttttattgtgtagaccatatttacatatttggataagtacacaaagcgtcaatgctgttaatggccttagcaaaggctcatgctgaaatttgccagtaaaacaaagaagtttaaagactggcaggtacaccattatcacataagtgctgtcagtataaagttgtggggataaaggaaactggatatttttagcacgatgtgcatgataatttatatgcttggtggctgtgctgctgattaagccgtaattaaaattcttctcatcccattggagtttttaatagaagcttcctccatcaattggcagaacctaaagaagattttaaggggcaaaagtaattacaataaaataattcacagtagtttcaatatagaaggaattagctattaaaggtatttgaagaaacta

SEQ ID NO: 2310 - DNA, 1424 bp, Homo sapiens; identical to SEQ ID NO: 2309

SEQ ID NO: 2311 - DNA, 6150 bp, Homo sapiens
aagatttttcaaggaattttcttctctataatataattaatgatctcctacttggacttctgtaaaagattacagtaaatcgtgaagtcttatggaggtttttgcgggagtgggtgggagtagttgtctattactgcgtctttgaatctaaaacagtaccaggatggggccagagggcatctgggctcttcacggattatataggcttgaccttgttagtactgcatgctgtcagagcctcatccaaaaaccactgagatgtttttgtgcaggggaaataaaatttcaagcactggcctatcatctaaagtgacttcttttcttgacccagtagttttctggtgggttataaagtgactttttttatgccgagaactattgaaacaatttatttttgtgtacaaatatgtatgttttgaattaactataaatattacgttataaaacttttttatttttatttttataaaacttgtgtttttaaattggaaattacactcattgaattgttttacacatgcagacacacagacacacacacacacacagcgaaacaaaatcctgagtgacagcaccctgtaactaactgtggtgagatttgattcaagttgacagactcttctgttttagagagtaaatgcctttggattataacttacatgtctttctcaggaaaccagaatgggaggtgggtaacgaaatattctttttggaaatggaagaatcttagaataaaatataaattcaaattgccaatactggcttgacggtaaagtggcaaatctcaccaagacagaggattgtgtgcattaccctgagctgccactcattcatcaggggtttactgagcatttgttatgtgcctggccctgtgctaggccccggggatggcaggataaatccaatgtggcttctgcctgtgaggttctgtaagtttgtggggaagagggatgtctcagcagaagcttgtgagactgtagaaggggtctcagggacactggaggtgcaaaaactagctcttcctggagtgggagtaggactagcttccctgaagcagctgccctggtgctgggccttgggaacagatggaggagccggtgtccccagccaggactccgtaaaggtgtggcattgcaggagggcctggtctgttctgaagagggtagggtgagactggaaagccaaacgggccagattgtgtggaggttttatctcatgggcagcgtaccatttggcccaggagtgccatgcctggggttgtatttttaaaaatatagtaaccatctccccctgcactctcatctaccctgctgcgtattcttggtgatacgttccaagacccccaatgaatgcctgaaaccacagatggtactgaaccctgtatatactacacacgaatttcacttttcttcacaatttcatgggtagaagattcgttcttaccgaagatcttaacatccttacctctttttttttccttattgagacttttgccgtttcacttaaaggaagcatttttggcttctctttggcatatctgaattgccagcatcactatccttacactttgggggcccttctaataaataaagggttacttgaagacaagcactgtgatactgagacagttgatctgataactgcgttggctactaagtaacaggctggcagcatccacagcatggacacgctggacaaagggatggctcgcagtttttgtaatggcaaaaatttcatcacactactcagagcgacatgtagtttaaaacttacgacttgtttatttctggaattttccatttagtatttttgaaccggagttgaccatggataactgaaattacagaaagtgaaacgtggctaacggggtgctagtccctcagtcatccccaagcccttcaccaactctgccctgtatttcagatcaccgaagtggccttggagtacaacaactgtcatggggaccaggtggtggagcgtctccttcagcacctgcggcgggtggatgctccagtgctggagtccctggccctggaagtgccggcacagctgccagacccgccaacgatcacagcgtccccctgctgcaacactgtggtgctgccccagtggcactccttctccaggacccacaacgtctgtgaactctgtgtcaaccagacctccgggggcatgaagccgagctcggtcagcgtgccacagtgcagcttttttgaaatggcagcagctctggattctttctacctcaaggagcagaccttttatcatgtggcatcagacagcatagaatgcagcaattttttaacttcctatagccccttcagctactacactgcatgttgcaggaccataagcaggggtgtgtcaggcttcatcgactctgaacaaggtgtctttgaagcccctactgttgcattttcttcccttgagaagaaatgtgaggttgatgccccaagctccgttcctcacattgaggagaacaggtatctctttccagaagtggacatgactagcacaaacttcacaggcctgagctgcagaaccaacaagactctcaacatctaccttttggattcaaatttgttttggttatatgcagagagactgggtgctccgagctccactcaggtgaaagaatttgcggcaattgttgacgtgaaagaagaatctcattacatcttggatccaaagcaagcactgatgaagctcaccctaggtactgcaggcagtttatttccccaagcattgtacattttgcttgacttcatatgggtaaattttattgatggctctcattacatttagttgtggggtgatgtcaccttcgtagctcattttaagtctttagaccaccatcagtcataattttcaaagaagctaattttgtctattaaatggaacagaaacttcctcactctgaattttggataagtttgtcatttagcccatggtgggggtaagagtcccactttctaaattggcgatttctgtcacatgtctaaggtagaaccagctgcaggcagtggggacttggggactagaacaggcagggaggtggagagctattctggtgggatgtcctaggggctgatgaaagtgagccttgacagcagctttgttctaaaggagcttaaagagaaagcagtggccgggcgcagtggctcacgcctgtaatcccagcactttgggaggccgaggcgggtggatcacgaggtcaggagatcgagactatcctggctaatgtggtgaaaccccgtctctactaaaaatacaaaaaaaaaaaaaattagccgggcgcgttggcgggcgcctgtagtcccagctactcgggaggctgaggcaggagaatgtcgtgaacctgggaggcagagcttgcagtgagcagagatcgcgcccctgcactccagcctgggcgacagagcaagactccgtctccaaaaaaagagagcagtgaagaaggaagtagagccgccttgcctccctttttgtctcataggcttaaatgtctaaggatcaaggccaccagacctaatttgttctgctgctgtttcataatgtactgagtaatattgctgggacctggggtacctacactgtaacaagtgtaaagtgcaaataaataagtgtcagtcgcaaaccagcaaaacccactttttgaggagtaaggctccatgatgagaaagcacccagagcttgcccctgggacttggcagcaacattgggctgacccaccctggcctgttcccaggaatttgctgatgcccttgactacacacaatgaagtgagaattcaaaagccacgttagttcagcctcattggaaacgggagggagggtcagtgtatgccgaatggagaaaggaggaatttggtagggaaggaaacctttcatttcaagttttaaagtatgaactcaacagtagactcagagcttctacatatgagtctttttagccatcctctttcaaatctaggtgaagcttgtttcttacattagacacatttgtgaaaaggctttatgtaaatattgatttttctatatcaagttacatattataaatccaagagttcctcactgtgtaaaagaaccctgtgaccagtcactttttgaagggcataaatctgtcgatattatagattactcccaattcatgttatctaaagtcattttgatgtgttgagctttcttaaaatgaaacaagcattttttttttaaatgggaaagagactccagagaaatggggtcagtgttcctacaagcatgtatttttgaggtagtctgtattagattttcctgaattccattcagtaatgctcaagtgtttaatgacctcataatgtgttcactttgaatttaagggtaattgaaagaagccttctttagatttctttccatcttctgtatcttctctgaaatgtttagcctagctgttctttgtcctgcagttagtgacagaattcttagggagcttgtaaaaaacacctactgtgtgtcattgttggtttagagacttaactcataaatcagctgtctctaggctagtttcagaatttaggctttattcagattaggaaataattcttggtttcatgtttcaaaaacatagccaactaagtgtttctcagatgctgatcatgaattctctttagtattcacatgacattcttcacttcctcttccattctgcacgctgcattgcccattgcacctcaaaatggagggagttagaagaaagaaaaagaactgaaactttagctgagtgcaatggtggacgcctgtagtcccagctactctggaggctgaggtaggaggatcgcttgagcccaggagtttaaggctacagtgagctatgattgcagcactgtactccagcctgggcaacagagtgagaccctgtctctttaaaaaaaaaaaaaaaagtgaaattcaaattagtattgtttcagatgaagcaaaggactctgaagatggcagaatttgtggtaaaactgttggttcaaatcaggtttttgattattatgggttttatgtatttttccactacatataattttttcttaacctttaaaaaaagaaacttaaagaaccttaataaaggaaacaaaaaactgtagctccttgtcctcaaattaatgagcatttaaacacattccacactactgtagcttgtgcagttgtcacatttgtggttaagcttaaaggtcttagtattatagggtgaaatttcttgaaaagatggtggcttgttgatgatttatacagtctcacttggtgtctatttgtggaccagtccttttaaaaaaagaatagtctatgaatattagagcatctaacattgcatagtgttttgttatccacattactgtctgctgagttaatactaccagagctaaacctgatgccacccgggcagctttgtttggggttttgctgataggtgaaatgttaaaaatgtgagcctatgaagtcatttgagtttttaaaatgtggagtttaaaagtaggccagctattctctttgtatctagaggagagttgatctcattttctctttatttttagagtcttttattcaaaacttcagcgttctctatagtcccttgaaaaggcatctcattggaagtggctctgcccagttcccgtctcagcatttaatcactgaagtgacaactgataccttttgggaagtagtccttcaaaaacaggtatggagtcatgagaggcaaaagttaagccatctgtccctcttaaaataatttccaaactacagttgttggggtgagcagctgtttttgatgtatagaagagtaaccacgtgatggcccaattatggaccgtgaatgaattacatgtggtttttaaatttcagaaaagtgctccagaaagcacagtattggaaagacctaaagatgaaaattttcactgtaatatttgcataggtagcatttttcgggtgcttgctggattctaagcaatgaggaaagaaatgaagaagagcccatttcccggtgcaagtaacatctgtcttccctttcccacaggacgttctcctgctctattacgctccgtggtgcggcttctgtccatccctcaatcacatcttcatccagctagctcggaacctgcccatggacacattcactgtggcaagg

SEQ ID NO: 2312 - DNA, 17946 bp, Homo sapiens
aagatttttcaaggaattttcttctctataatataattaatgatctcctacttggacttctgtaaaagattacagtaaatcgtgaagtcttatggaggtttttgcgggagtgggtgggagtagttgtctattactgcgtctttgaatctaaaacagtaccaggatggggccagagggcatctgggctcttcacggattatataggcttgaccttgttagtactgcatgctgtcagagcctcatccaaaaaccactgagatgtttttgtgcaggggaaataaaatttcaagcactggcctatcatctaaagtgacttcttttcttgacccagtagttttctggtgggttataaagtgactttttttatgccgagaactattgaaacaatttatttttgtgtacaaatatgtatgttttgaattaactataaatattacgttataaaacttttttatttttatttttataaaacttgtgtttttaaattggaaattacactcattgaattgttttacacatgcagacacacagacacacacacacacacagcgaaacaaaatcctgagtgacagcaccctgtaactaactgtggtgagatttgattcaagttgacagactcttctgttttagagagtaaatgcctttggattataacttacatgtctttctcaggaaaccagaatgggaggtgggtaacgaaatattctttttggaaatggaagaatcttagaataaaatataaattcaaattgccaatactggcttgacggtaaagtggcaaatctcaccaagacagaggattgtgtgcattaccctgagctgccactcattcatcaggggtttactgagcatttgttatgtgcctggccctgtgctaggccccggggatggcaggataaatccaatgtggcttctgcctgtgaggttctgtaagtttgtggggaagagggatgtctcagcagaagcttgtgagactgtagaaggggtctcagggacactggaggtgcaaaaactagctcttcctggagtgggagtaggactagcttccctgaagcagctgccctggtgctgggccttgggaacagatggaggagccggtgtccccagccaggactccgtaaaggtgtggcattgcaggagggcctggtctgttctgaagagggtagggtgagactggaaagccaaacgggccagattgtgtggaggttttatctcatgggcagcgtaccatttggcccaggagtgccatgcctggggttgtatttttaaaaatatagtaaccatctccccctgcactctcatctaccctgctgcgtattcttggtgatacgttccaagacccccaatgaatgcctgaaaccacagatggtactgaaccctgtatatactacacacgaatttcacttttcttcacaatttcatgggtagaagattcgttcttaccgaagatcttaacatccttacctctttttttttccttattgagacttttgccgtttcacttaaaggaagcatttttggcttctctttggcatatctgaattgccagcatcactatccttacactttgggggcccttctaataaataaagggttacttgaagacaagcactgtgatactgagacagttgatctgataactgcgttggctactaagtaacaggctggcagcatccacagcatggacacgctggacaaagggatggctcgcagtttttgtaatggcaaaaatttcatcacactactcagagcgacatgtagtttaaaacttacgacttgtttatttctggaattttccatttagtatttttgaaccggagttgaccatggataactgaaattacagaaagtgaaacgtggctaacggggtgctagtccctcagtcatccccaagcccttcaccaactctgccctgtatttcagatcaccgaagtggccttggagtacaacaactgtcatggggaccaggtggtggagcgtctccttcagcacctgcggcgggtggatgctccagtgctggagtccctggccctggaagtgccggcacagctgccagacccgccaacgatcacagcgtccccctgctgcaacactgtggtgctgccccagtggcactccttctccaggacccacaacgtctgtgaactctgtgtcaaccagacctccgggggcatgaagccgagctcggtcagcgtgccacagtgcagcttttttgaaatggcagcagctctggattctttctacctcaaggagcagaccttttatcatgtggcatcagacagcatagaatgcagcaattttttaacttcctatagccccttcagctactacactgcatgttgcaggaccataagcaggggtgtgtcaggcttcatcgactctgaacaaggtgtctttgaagcccctactgttgcattttcttcccttgagaagaaatgtgaggttgatgccccaagctccgttcctcacattgaggagaacaggtatctctttccagaagtggacatgactagcacaaacttcacaggcctgagctgcagaaccaacaagactctcaacatctaccttttggattcaaatttgttttggttatatgcagagagactgggtgctccgagctccactcaggtgaaagaatttgcggcaattgttgacgtgaaagaagaatctcattacatcttggatccaaagcaagcactgatgaagctcaccctaggtactgcaggcagtttatttccccaagcattgtacattttgcttgacttcatatgggtaaattttattgatggctctcattacatttagttgtggggtgatgtcaccttcgtagctcattttaagtctttagaccaccatcagtcataattttcaaagaagctaattttgtctattaaatggaacagaaacttcctcactctgaattttggataagtttgtcatttagcccatggtgggggtaagagtcccactttctaaattggcgatttctgtcacatgtctaaggtagaaccagctgcaggcagtggggacttggggactagaacaggcagggaggtggagagctattctggtgggatgtcctaggggctgatgaaagtgagccttgacagcagctttgttctaaaggagcttaaagagaaagcagtggccgggcgcagtggctcacgcctgtaatcccagcactttgggaggccgaggcgggtggatcacgaggtcaggagatcgagactatcctggctaatgtggtgaaaccccgtctctactaaaaatacaaaaaaaaaaaaaattagccgggcgcgttggcgggcgcctgtagtcccagctactcgggaggctgaggcaggagaatgtcgtgaacctgggaggcagagcttgcagtgagcagagatcgcgcccctgcactccagcctgggcgacagagcaagactccgtctccaaaaaaagagagcagtgaagaaggaagtagagccgccttgcctccctttttgtctcataggcttaaatgtctaaggatcaaggccaccagacctaatttgttctgctgctgtttcataatgtactgagtaatattgctgggacctggggtacctacactgtaacaagtgtaaagtgcaaataaataagtgtcagtcgcaaaccagcaaaacccactttttgaggagtaaggctccatgatgagaaagcacccagagcttgcccctgggacttggcagcaacattgggctgacccaccctggcctgttcccaggaatttgctgatgcccttgactacacacaatgaagtgagaattcaaaagccacgttagttcagcctcattggaaacgggagggagggtcagtgtatgccgaatggagaaaggaggaatttggtagggaaggaaacctttcatttcaagttttaaagtatgaactcaacagtagactcagagcttctacatatgagtctttttagccatcctctttcaaatctaggtgaagcttgtttcttacattagacacatttgtgaaaaggctttatgtaaatattgatttttctatatcaagttacatattataaatccaagagttcctcactgtgtaaaagaaccctgtgaccagtcactttttgaagggcataaatctgtcgatattatagattactcccaattcatgttatctaaagtcattttgatgtgttgagctttcttaaaatgaaacaagcattttttttttaaatgggaaagagactccagagaaatggggtcagtgttcctacaagcatgtatttttgaggtagtctgtattagattttcctgaattccattcagtaatgctcaagtgtttaatgacctcataatgtgttcactttgaatttaagggtaattgaaagaagccttctttagatttctttccatcttctgtatcttctctgaaatgtttagcctagctgttctttgtcctgcagttagtgacagaattcttagggagcttgtaaaaaacacctactgtgtgtcattgttggtttagagacttaactcataaatcagctgtctctaggctagtttcagaatttaggctttattcagattaggaaataattcttggtttcatgtttcaaaaacatagccaactaagtgtttctcagatgctgatcatgaattctctttagtattcacatgacattcttcacttcctcttccattctgcacgctgcattgcccattgcacctcaaaatggagggagttagaagaaagaaaaagaactgaaactttagctgagtgcaatggtggacgcctgtagtcccagctactctggaggctgaggtaggaggatcgcttgagcccaggagtttaaggctacagtgagctatgattgcagcactgtactccagcctgggcaacagagtgagaccctgtctctttaaaaaaaaaaaaaaaagtgaaattcaaattagtattgtttcagatgaagcaaaggactctgaagatggcagaatttgtggtaaaactgttggttcaaatcaggtttttgattattatgggttttatgtatttttccactacatataattttttcttaacctttaaaaaaagaaacttaaagaaccttaataaaggaaacaaaaaactgtagctccttgtcctcaaattaatgagcatttaaacacattccacactactgtagcttgtgcagttgtcacatttgtggttaagcttaaaggtcttagtattatagggtgaaatttcttgaaaagatggtggcttgttgatgatttatacagtctcacttggtgtctatttgtggaccagtccttttaaaaaaagaatagtctatgaatattagagcatctaacattgcatagtgttttgttatccacattactgtctgctgagttaatactaccagagctaaacctgatgccacccgggcagctttgtttggggttttgctgataggtgaaatgttaaaaatgtgagcctatgaagtcatttgagtttttaaaatgtggagtttaaaagtaggccagctattctctttgtatctagaggagagttgatctcattttctctttatttttagagtcttttattcaaaacttcagcgttctctatagtcccttgaaaaggcatctcattggaagtggctctgcccagttcccgtctcagcatttaatcactgaagtgacaactgataccttttgggaagtagtccttcaaaaacaggtatggagtcatgagaggcaaaagttaagccatctgtccctcttaaaataatttccaaactacagttgttggggtgagcagctgtttttgatgtatagaagagtaaccacgtgatggcccaattatggaccgtgaatgaattacatgtggtttttaaatttcagaaaagtgctccagaaagcacagtattggaaagacctaaagatgaaaattttcactgtaatatttgcataggtagcatttttcgggtgcttgctggattctaagcaatgaggaaagaaatgaagaagagcccatttcccggtgcaagtaacatctgtcttccctttcccacaggacgttctcctgctctattacgctccgtggtgcggcttctgtccatccctcaatcacatcttcatccagctagctcggaacctgcccatggacacattcactgtggcaaggtaagcaggcctcttctgcagcgctttgggctgtatgcccattttcactcttatttgcagcttagccatatggtgtgtgagggtctgcccattttccattaacctttggtaggacttggctgaatttaattgtcaggttgaagccatgagcaaagcctctttgaaactgaacttttcctcatgaattctgagtgttccttccatgatgttgatgtttagccctgactagattcgtaggtggctgagtgcagttctgtggggagagcactgacctggttgccaggatggccccgtggaataccatgggacagttgccccaggcaatgccagtgggtcctgggatcccaagcagatctctccaccagccctggtttatctcatttgtgaaattaaaaggaaagaccaatagatatccacattctggtattgtgattccatgggtactgtatgtgcgcttttgagtaaacaaaatttttaaaaatattttttgggaaaagaaggctcaaatacagagtctttagatggggtagtaagcagttttgggtgaggaaaactgttcacatttaaccccccacctcccccaaaaccctacagatagataagagttaaatataaaaaaatcaaaacaaaaaataggatttgctgattcctctgggagatggaaactttccaaagtggaagcagttggaaaaataaagagagaaaaatggacagattccactagaaatacgtgcagtgaaaacagggaaagcagacaaaaagggggaccattaatatattttccagtgtctctgtgtcacctgttatatgcactgtaagtaataattagaatcaaatctgaggagttactatgttgggagagtttttgatatacatattacctgactgagtccttgcgacgcttagtgaaggcactctagttaaaaaaagaaagtgctatttgtgttgaggaggaaactgagacatagaaagattcgacaagttgcccagagtttcaagctgcaaatgaggggccaggattaaatcaggcattcatactccagcctccccggaaattaaaatggtttagaagatggctgagaccgattccattctgaacaaaggatgtgagcaggtttttcttttaagaggagagagtaaataaacaagtggggaaattataacctaataaatgtaaattaaaacagtaacaaagtatcatttaacatattaaagtaatcagtggttttaagtgacagaatcttgtgttgataaaataaaatggaaactgcagtcagatgtatctaatggaatgagtacattgccataactcttttggaaagcattttggcaacatttacaagaaatcaacaaaaacagttaacacatttttgacccagttaattttactttggagaagtaatggaataggaattccgaagaagcatgagctcatcattatagcattgtttacatccaccaggagatgaatgtttaagtaaattatggctgggcatttaatggaatttttatccttcaacagtgcttttcatacagttaatggaaaagaacagagtatgaaatatatgacaactcttcttaaaaatatgtaaggatataggcgaggtgcagtggctcatgcctgtaatcccagcatgttgggaggccgaggtgggcggatcacctgaggccaggagttcgagaccagcctggccaacatagtgaaaacctgtctctactaaaaataaaaaattagccaagtgtggcggcacgtgcctgtagtcccaactactcaggaggctgaggcaggagaatcacttgaatccagcagccggaggttacagggagctgagattgcaccactgcattccagcctgggcgacagagcaagactgtgtctcagaaaaaaaaaagtaagcatatagaccaagcctgcagcctgcataagaaaggggggccttatttagcccaatggaattctgagtggattttgacaatgttttaattttatagtttgctttctttgaagtaagaatcaagtgagaaaaagcatttaattatggaatatagtgttcactcccacttgtttagaaaggaacactaatgttttaggtaggctggcacaggtgaggcaggagtgctgttttgttagtaaacttttggtaaatggttttcatttggttatgccttttgttgctgttgttgttttttgtttttgtttttttttttgagatggagtcttgctctgttgcccaggctggagtgcagaggtgcaatctcagctcactataagctccgcctcccgggttcacgccattctcctgcctcagcctcccgagtagctgggactacaggcgcccgccattatgcccagctaattttttgtatttttagtagagacgggtggcgtttcaccgcgttagccaggatggtctcgatcacctgacctcgtgatctgcctgcctcggcctcctaaagtgctgggattacagacgtgagccaccacgcccggcgttgttgtttttttgagacagggtctcactctgttgcccaggctggaatgcagtggtgcaatcacagctcactgcagccccaacctcccaggttcaggtgattctcccaccttcccaagtagctgggactacaggcatgtgccagaatacccggccaattttttgtagagacagggtttccccatgttgcccaggctagtctcgaactcctgggctcaaacagtccacccacctcggcctcccaaagtgttggatttacaggcgtgagcccctgtgctcagcctggttgtgccattttttgaaaagcaaatttcatccttttggacacatacatgacacttaccgcaccctcactccccccagttatgctttctaaaaacttctgtcaaggtaaagattgaaaacatgttcatcttttgtgtgcactgtttatgaatagtagctgaatagcccctccgcaaggaggatgcagccccttccataaaggatgctgttgtggctccatgtctgcttagcccgagtgtgggcgcccagctgtgtgcccagctctgtgccagctgcccggggcaggcctctagagcagttgcggttagctcccacagtgattgagcacaggctgggtgagttagtacagatgtcattttctgtattagaaaattaatgtcaaatctgctaagaaaataggctgtttttggtctctatccagatttacaacataaagagggtataattttccatcttcagaggggcttgatgtattttgctcaatgatttcctttcttttcccagagctattcagggattaaaatacttggctagatcctgtcaggtgaggagtgaatgactcctcaggtgtcagtgcggcattttctgcaagttcatttttactttcaggacatcacattgccactcagtggaaagcgtccacgtagtagaatgttgtatgtcttggaagtatcagcgcccagctcacacctggtagtacattcatcgagaagggactagcccaatgtggggtgtaaaaaatgcaccaggttcttgaagttatctgagaaggttctttcaagttggtgtttcttgggctgatcatctgccatttctgttctttccctttaccaggattgacgtgtctcagaatgaccttccttgggaatttatggtcgatcgtcttcctactgtcttgttttttccctgcaacaggtaatgccaaatttttgtcactggtgggcagttgggattcttttgtggaggtctgaaaatgaaatgggtttaagatgtaaatcattcattatgttcaaaaaatgttcccttaggaaccaggcgtggtggctcatgcctgtaatcccagcactttgggaggctgaggcaggcagattgcttgagctcaagaggttgagaccagcctggccgacatggtgaaaccccatcagtacaaaaaatacaaaaattagccaggcatggtgacatatgcttgtaatcccagctactctgaggctgaggcacgagaatctcttgaacctgggatgcggaggttgcagtgagccaagatcacaccactgcactccaacctgggtgacagagcgaggctctgcctcaaaaaaaaaaaaaaaaaaaaagtgtccttagggacataaaagggttgtagtgtcaggatgttatgtgtggtatggatcttttaaaggttgtttttcccagtctatctcttacccgagcttgaatgtggccgtgagaattcttagctttcatggcctgtatgaacatatggaggacgcagagactgacaggattcttctgttgccctggctggagtgcagtggtgcaatgtttgtgtggggcaaaacagcagagaatctgtggagccctgcctgccccaagccttccacttgcttgtctctcagttggcctcccagcagctcctcatccctctcgtacagaggacagggtggctttcttacccatggcacgtccttttctcggattccaggaggcctacaaaggggttttctcccatgcgtgcagactgctgtgaacgtccgccatgggatggtcgcttgattttttcacacttgcctaatcagtattccaggtgcagttcttaacggcaactaccccggaagcccctgcaagcaggacattaacaagggggagcggacttccagttagtaaacgtagatgcagatgttttagtggaaaaagaaattaactcttggtcctttagagcctaatacactggatgtttgctccctttttatagattccctttggtttttagaaagttgagtccttttggggacccactcacatgactttgacagtatcttctctccaggggaaagtgtctgcagcatcatttagggagttccctggctcgcatgtatgacgtttgctgttttaatttcctgcctcccttttgcgattcagcttgtcatgtttctctaggagagtgtttccttcatatctattgaatcattcccttggtttttgctttgtatctcaaagaatttttgcgggagtacttctgtggtagtagggtcttgtcacatcatgcactaaaaacagaatgtgactcacccttttctactgctgactgagttgtgatgaggctttttctttctaagaagtgtttaaattaccacatagtccaggaatcacggacagtaacactaacactttcatctgtgtgggccaggagttgggcatgtagtttaatgacgtataatttttgaattccaagcatagtttgaaaaaatatgaaaatcttagcacccagcacatgccttttaatgaagaagttctcagcagctggcagaaatgcatctgtgtagagagacacaggcggaacaggtggcagggtggggcgtcatctggaggcctgcgtctgggctgagtgaccttcgttcttaggctgcctggtgtgggaaacgtgaagatgtgcgcatttctccggccccatgctgggcacttgctgcaggcccttacccttgtcgtttctaaatatcgaacataagaagactgtccacttctcttttaatgtaaggatgttggtaaaccaaagctttatggctttggaatggaatttttctcatttcctaaaaataaatggtagaagtaaagtatgctcatcatgagctggtcccaagcgagtgtttggtttagccagaaggtaaatgggcaagcagcgtgagctgacagcttgcaaaagaggaaatgaaaaaggctgttggataacatgtagtaagacctttttcattgtccacctgcttatgctatttttagtgaaaagaatatgaaattgtatatttactgtgataaaatataaacttgtgcatgtgctaggtggagatgttcacagaggggaaaatgttgaggtgttaacattgatgacttcagaggagtgagattgcaagtgatttgaaggtgctgcttgtatgtttttacatcccttgcaaattgtctacaaagagcatgtcttgatttataaaaatcatgaaggaaaaaaatgcaagagcctgtccttgggaggaagaggaaggggtggggccttgagggagacatagccttcctgtgcagaggcatcttggagccacttgctccaccgagcaggtgctcctccagccagcacttgcgtcagactctgtgtgacattgcaaaatataggtgctctggcctggccctgggccagggtgatgagggggagatgggtgctcctgtccaccaagagactctgatgtgtcccaggggaagaatcacagttttttagaggtgtgccctgccactccctcagggttagaggagagttgcatagacatggggacctcttcccaccatagtttcacatgactgctttcctggaagtagactgttgacattctctgtccctgctactttcacaaagtgtggcagtattttagtgtgcccattagggacattgatggagagtgcaccaagacctcttagttagcagatagcatgctcacggatgtcactgtcctgtaaatgtctggaggtagacatcctgagggatcttggcagctttttctgggaagtaattcacgtttactctgccttacaagaccaggcttgtgccgcagaacgtgggggcaggtccagcgtctggtattcttccatgggcccacttgacagggccacgatgtgttttcagttgttgtggggttttttggttttctgtttttgagacaaggtctgactctgttgcccaggctggagtgcagtggtgcaattacggctcactgcagtcttgaactcctggactcaagtgatcctcccacctcaggctcctaagtagctggatctacaggtgtgtgccaccttgcctggctaatttttttatcttactttttatacagatgaggccttactatattgtccaggctggtctcaaactcctggcctcaagcgatcctcccacctcagcctcccaaagcactgggattacaggcacacagcaccacacccagctttgtcatttgaatggctgggccccacttgaagaaagcttatatgttaagaaaactaagctttaaaggaggggatggttgaatgtttaccccaaaattataaaacaatttacggccgggtccagtggccctgggcagccaggctctggagtccctgctgttgacttccattctgttaacacctgagggagacaaactcggctgccggcccacctcatacctaagtgcataaagctggtagttttgatcaattgcagccaggctgtacaggcacaggtaaatagatatgtgagagaaacatcatcagacgattaaatgacaagttctgaagaggaattttctagatctctagatcaggacctggaacaaagctgtagggaaaacccctttctatgtcaccttccttccttattctgtgctctcagggctgggcagcctgaattcatagtcctttggttgggctgtttgccagttatcaggttgccaggtgtgagccagatgtacctggggaatgggggtacagtcacccccagttgagaacccctgccttagagaatgtgtaataaatgcttgctgaagaaacagactgggtatctttcaagttcttcctttttctccgggcactgtcagtgggcacaagagggacataggtgggacactcctgcctcccctggacgctcttcctgacacagccgctgggcatctccgagcacacagaggccccatgcctacacactcctggggccctgcatcactggctttaggcctgggcctaggagctcttgtctttcttggagggtgtgggtgaagctgagctctggcttcaggaacagataagccatcttaattacagaacgagcatatgggacagcctcagctttgtagagaatttcttgcccaggcaacattttccttactttcagtaagtaaaatccacggaacgtcttttcttggtgagaagtagatggcctggcctcaggtacagcctgcttttggactcattgtgttggtgtgactcctgtctttgcttcctttccctctctctccagaaaggacctaagtgtgaaataccccgaagacgtccccatcacccttccaaacctgttgaggttcattttgcatcactcagaccctgcttccagcccccagaatgtggctaactctcctaccaaggagtgtcttcagagcgaggcagtcttacagcgggggcacatctcccacttggagagagagatccagaaactgagagcagaaataagcagcctccagcgagcacaagtgcaggtggagtcccagctctccagtgcccgcagagatgagcaccggctgcggcagcagcagcgggccctggaagagcagcacagcctgctccacgcacacagtgagcagctgcaggccctctatgagcagaagacacgtgagctgcaggagctggcccgcaagctgcaggagctggccgatgcctcagaaaacctccttaccgagaacacgtggctcaagatcctggtggcgaccatggagaggaaactggagggcagggatggagctgaaagcctggcggcccagagagaggtccaccccaagcagcctgagccctcagccaccccccagctccctggcagctcccctccacctgccaatgtcagcgccacactggtgtctgaaaggaataaggagaacaggacagactaactttttaaatgatatgaagaaatcagaggtgaaaattgtacattgggaatatatttatgcaaattttattgaaatttattgtaaataaagattttctcagtggtctagaaaatcagcttgaatgtcattcagcatttattgaagaaggatgacatcccttccacttattgcacaaacttggtagctttgagacaaatacagtagcacagtccgtttgaagatttgtccaaaaaattagtccatattttagtggctcagtgtcaagagttccctccctgtgcccccactgttgcttctgcagtgatacgaaggatgaatgcttaatttcttattagtcagaaaacttgaatgcaacagttgggcattcaaaaataatccagagaggtcataacctacttagccatttgagtgtggctctggtgtctgctaaaaaaagtagctattgaaaaaacagtgagagctatgatgtggttcactcattctagaagcattttcattttcctcccgaaaacccccccagtgcctcaccgagccccggaccttcacccaacacggctgccacgctcaaatgggcctgattcaaactcccaggtacgtccctggcaccagggagtaggataagaaaacctccagaagtgaaactgatgaggaagtgacatttaatcacttcaaaaccgaaacttcactggcaaggtcaaaaccccaggccaaggctgacaatcgagcgctggtcagttccaggggtcaggctcggaacctgaaaatgcagatcctagctgttgctgcgtccctcaggtgtggaggaaggaaaaacagcctaggtgtatgtgctggctgtggtgagagtcgaggtagaaagcctggaagttctgaaacgtgaggggatggatcacacgccccagccttttctcactcaccaaagcaaacttttacccccttcttccagtcggcacctttggaacttgttctccctcctaggcctggtttcagtggcccccaccacgtgtcctgcccacccagcctgcagggcttctgctgacatcacgcctaccccaccaccacctcttctgaacttgccacaccatcagtagccagaggtgttgcctctcctgcttcctaaggtctcccaagagcccagctgaggtgtttcattaccaccttctgctcaggtggcccagccggctgtccctcttccaccccaagctcctacttaatgtttaaacccccaatttaggtgtatgctgcttaaacgaacagctccctacttctcccgcctcggggttccagaacgtggattcattcaacatggtttttagaagaggcttgggtgaggccagaggaggtgcctttagtctgagcaggaggccagagctctgagctcagccatgaagggccagtgctctgtggttaagccggggctgaccttccatctattacagggatgggcaggcacgagtcacatttgaatcataaataaaattagtatgtgcttgtggtgggattaaaaatcaaagtgagctcactgaaatgtacataggggaggccttggagacaggctgtggagacactagctcaccagagagccaccagctcaccacctgtgggagagtcaagtcctgaacttcaagttcacctctgccctgccccggctccctgccgcaagcacaggctggcaggaagcagtctggtggctcttaggggaatgtgcacgtgagaaatgttccctgggtcctaagtgcctttagagctgggtcaggggactggagacccgctgaggaaagtgaagtcagaaccccataggcggacggtcatcagagaggaaaggaagccaagtgatgtgaagagggaagaggaaaagaagaaaaaagacagaacctcaacagtcccctcccctccagtgcagaaaataggaaacaccaacacaaaacatacaaccttttctctttcctgggccaagtgggtttcagaccaaaagtagccaccacaggctctatgaggaccaaagcaatttcagcgaagccttcactcggggtggagggttggtggggggcttggcgtgctgaagacccaagcggcaagaaactgctctgctacaaggacgctggcagcctccaggacgcgtgccctgactcgcccttcactggctcccaggcaggtccggtagcttccctgcagtaactccactctcaacagaactgctatttaacaagtgagtctatgcagaaagaacggaggggtgcggggggtgtggtttttcttccacccatgactaatgaagcagagatcacccaagcaccccaactggtcagcctcaagaccccaaattggcatctcacttccttgacatacacgcagatggacacacatgagagacccctgccgagtgtggcgtgggcctttacaagcctatgaccctccagggtcttgactcagcttgtcattagtacagccagaataccagtcccgtgtgcgctagatgatatttttaaaaatcagcaaaagggcttaagcacgtgcttccaggggcctatttacagttcacaggtttgttagttcacgcattacagtagtagctccatcaaaaacaggctcagctagacattcaagtaacaaaagcgctacagggccatgagccccagcaaggtcaggcctgcccagtgcctgcaatgggcagcctcacctggaggccgaggggaagcccaggacagccaggtccccgggcatcagtgcatgcgatgacgaagcccgcagaggccatgccagcaagtgtcagcccttcctctcagacagcagcgcatccgtatggttttgcccctcccagcgcctcttggccggctgcaaacaggaccaggagccttgcatcctggctcagccgtggacttccgggccgttgggagtcatcagcttggcctttctctccacgcacggtcccttggccgaatactgcaccagcaggaagggttccttggtctccccatcccccacgatgctctcctcgtcctctgactggctgatgcgctgcagccgcaggtagcaccagcagcccaggatcaaggcccccagggccgcgatggcaatgaggatgacgatgactgtgaccacgcccgtggtggggctgtggtccataatagacat

SEQ ID NO: 2313 - DNA, 7576 bp, Homo sapiens
caaacatttcctggacagtcactgagcgccaggccctttgctagtgtctggggatgcaaagcactctctgccctcaaggacttcagtgtttggtaggattgttgtaaagagtaagtgtgttgaatgagatgcatataacaacactgggcgcatagaaagccactatatagatgtaatatagtattatttgtgtcagtgagtagtcattaagcactgaatgtgatagaccctgtacagaacatattaaaccattgtaccagagctatagtcttactttacttttcatcttttttcagctacgtgtatgtgtttctaagcaaaacttcttggaagaaaaggaaattcttagaagcaattagagtatcacacccatgctataccctttgattcattagcttgctctgtttttctgttattttgaaattacccaagtggaagcagaaaaactgccaggaaaatgtcacagccaccccttactgaacagcagaaacaccagcaaaacaccaactgcaacatggtgtattttgaaggtagaccaaatagcattttctgataatttggatataaactgtgaaagaaatatataagactcaaggatggttccaaatattttggcttgagagactgaaaatatacatttaccatcatttatgatagggaagcctttagggagaaaaagcttggaatgagataataaagattgtaaatttcagttttgggatatatttaagatgtctaacttccaagtggagatactagttaggcaactaaagtgtgtgaagctgaagttcaggagagaggtttgggttggagatataaatttgagggcagtcagcatctttaaaggcaggaagctgggtgtgatcaccaaaagaatgagtgtggatcaaataatgcctaacaaaaggttaggtaacaaaagcaaaaatagacaaatgggatcagatcaaattaaaaattcttctgcacagcaaaggaaacaatcaacagagtgaaaagacaacctttggaatgggagaaaatatctgcaaatgatatgtctgaaatgggattaatatactaaatatataaagaactcagacaacacaatagcaagaaaataaataactccacttaaaaatgggcaaaaaccctgaacagtaaaggaaaagaaatatattttccttactcatcacaaggtacatgattgtggctcctataacaaaagacagattaatttaaaaattacaaatttatttaaaataagttttatgtgacttgggagcctttggaaataaactcccaaagaaacagagaatgtgtatttttatgctaaatttgatgaaaaagcagatagctacagagaagtataattggataaaaggggtatgatctaatggtaataaactaggagaaacttaacaaggcctgtttgttcagattcttctctgtttctgtatgtcttcagagataagaacattccttttctctgtgtataggatgggtgcctctggaatgaaggccttattcagggcaggagggtgggagacagtcagagagaccttcctgcttctgctgttttctcaaattgtaactgtaataggttcattgcttaatgcacagtgagtaaatataccgagacaccaggggttgcaacagaaaaaaagtttaataattgtagggcagcttgacaagaagaaacctcaaatctaccttcccaagaggtttgagggtaggggttttaaggggtctggatgggtaataggctgaagtgtggggattgccagttggtcaagaagtgagatgtgaaatcatcggacagggtgatatagaaaccgcattcttgtgctgtcagttcccttgtaaggggagtcttcagactggttagcatcagccattctgctggaattaaggatttaaaaataccttacgcaattcttgctgagtgtggtggctcacgcctgtaatccagccctctaggaggtcgaggcaagatcacttgaggtcaggagttcgagaccaacctggctaaggtggcaaaaccccgtctctactaaaaaattcaaaaattagccagccatgggtggcgcgcatctgtaatccctgctacccagaaggctgatacaagagaatggcttgaacagcttggagagcagagcgagactccgtctcaataaaaaataaaaaataaaataataacgaaaaataccttaagcaattattgagtacaaaaggttttataattttatatcacaaatcttatctatgggaacaatgcaggagccgggtcagcatgctctacgtagattcttagtcagcagctgtaagaaagtggatctaggttcaccaatgcaccctggttaatgcctaactataattctgctgaaatcttggcttataattctcatcagccttgtaagggtggtttcaaaatgccaacgtgtcatattttgaggtattatgtcctgaaccccatcaatagacatctttcaaaagaagacatacaaatggccagcagatatagaagaaatcttcaacatgactaatcatcagagagatacaaattaaaaccacagtgaactatcaccttacagctgttagaatgactgttatcaaaaagacaaaaggtaacgagtgtgggtgaggatgtggaggagagggaacccttgcacgctgttggtgggagtcacaaagtcattatggaaactggtattgaggtttctcaaaaaattaaaaatagaactaccatgtgatccagcaatcccattactgggcatatatccaaaggaaatgagatcagtatgttgaagagacaccagcactcacatgttcattgtagcacaattcactatagccaagataaagatatggaatcaccccaagtgtccatcagtggatgagtggataaagaaaatgtgggatatatacacagtggaatactatacagccttacaaacagaaaattctgctatttgtgacaacatggatgaacctaaagaacactatttaagtgaaatgagccaagaatgaaatgacaaatacaacatgatctcacatatatgtagaaattcaaaaagttaaaatgtttaactcgtagtagcagagggtcgaatagtggttaccaggggttggctgggaagggattggggagatgttcatcaaagcttacaaaattttggttagacaggaggaacaagttcaagaaatctattgtacaaaaataacaatgtattatatgcttgaaaattgatgaaaaagattttatcatcacaaatatgtgagataatacatatgttaattaggttgatttagccattccactacatatacatatgtatgttttcaaacatcatgtacaccataaatatctactcttttttcaattttttaaaattaaaaactttttcttgaaaagtatgaatctaaaagagataagggccaaaaacagatatagagcacaccagattttcagaagtcaagaaagagaagaaaaggaaatgaggagacaggatgaagacccagcaatgtattagataacaaggactgaccaagtatatcaacctatcagatgtaactcatctaacttaccaaatgttattaacaagtaacaagagggctgaaaatcaatcattgaatttagcaacataaagatcattggtgattttgacaagagcagatttaatatcatggtagggaacaaaaacctaggttcaagagggtttaagagagactgaaaggagaagaattggagaaaatatgtgaaaatgctttcagagagttttgcttgtaaagaagattagagatatggtctaacagctgacgggaagtggggttgtttttctttttttttttttaatcataggagtaataacggaatattttattgtttttggaaataacccagtaaaggagaaattgatgtttaaaatgaggggataattgctacagagagtttcttcagtagatgagaaggaatgggatgtagttcacaaaacaaggaagtggctttagagaggaacacggagagttcctctctaggtaaatggatgatttacagataggtactagaagggaagtcaaagattgtgggtatagaccatggcaagtgggtagatggtggtaggaatcagaaagttaatttctggatgcttctgtttaatcattggaataggaatcaagataatcagttgtgaggagaggagatgtgctggaggcttaaggagtgagtagaaggtgtgaatgaaatgacaaatacaacatgatctcacatatatgtagaaattcaaaaagttaaagtgtttaactcatagtagcagagggtggaatggtggttatcagggaaaggattggggagatggagggagtaggaggataaaaggcctaggaaagtacaattgattgcaaggtgcgatcaaggcctgtttcacgtttctggtagggtgacacactgtcccagtttgcttggaattcatgggttttctgggatttagactttcagtgctaaaaatggaatagtcctgggcaaaccagggtggttggtcatactagtttttagttgtgaattgagagaatttaatgtttttgtttcttctgctgccatgaacagctgtaggagtgcagggttaaattaggcacagagagagagagagagagagtgagagacgggggcaggtaggggcggggaaagagagagagagagagagaatttgaccagggttctagttttgccaaagaatacaccaaacaatttgatccaaccatttcacttctgggtatatatccaaaagaattaaaagaagagtctcagacagatatttgtacacttgtgtttagaagagcattattcaaatagccaaagatggaggcattacaagtgtcctttgacagatgaatggataaacaaaatgtggtgtatacatacaatgcaatattattcagccttaaaaaggaaggaaattctgatacatggatgaaccttgaggacaatatgttaagtgaaataagccagtcacaaaaggatgcattctgtatggttccacttatatgagatacctagagtatttaaattcatagagacagaaattaggtggtggttgccaggtatttgttgtttaaggggtacagagtttcagatttgcaagatgaaaagagttctggagatggataatggttatggttgcacaacaatgtgaatgtagttaatactactgaagtatacacttaaaaatgttaatcataaattttatgttacatgtattttgtcaaaaaaatttaaaaagcataaaaaacataagaccacaaacaaagcgagaggaggcaaatgatttggagggaattatgcaatgaaatgatctgagcaatttggttatgtataacttctatggaggagtttgttttagttttagttttggtgataatagggagaaaaagatcaggatttgggttctggacatataaaatttgaagttcctattagacatacaagtagatatgttgaaaaggcatttggatatgtgggataggagactgagaggcaggtctgggttttagataaacatttggaatgtaacaaggactgtaactcatagtttcagggccttaggctttcagagatgttggcggggtttgagaggcttcattggatctttatctgtggctcaaaattagtttttaaaattattatcaaaatgatgcctttcagaccattttactttttaacaaattaatggcttaaaaaaaatagcagtcctctgcaccactcatcccactctccacatttatctttgttaagttctttttctagcattttctatattttgacttctctactcctcagcacccaaagtcttgtttctgctatctgactagggtcggccaggattaatatcatggtgtcattcatctctatatatgctgattacctccagaggccccagaccccaaggccatcctcatctttagcactcgaatccacacgacactctgcacataccctatatgggccccattcagctctcaccctgttccaccccctaaaacccttccgctactataccctctgagattcatagtgcttcaagagaaaaatcctctatgtctttcacctctgagactaattgaagaggtgaacagaccataatgtatatcaaaatgaaagttgcaaggccaagcactacctaggctgagcctcagtacaatatttatgcaggttttgggaactgggttttacgttgtattcttaaatgaatgggtttcagatataaaatgaatagctctgtactttgcagcatgcttgtgaaatggaatctggtcatgtatttctgttattggacaaaagtccattgtttgtttcatattttatgctcagatgctaatttttcaaatgaatctttgtttttgtaggtgagattaaatttacctacacctagagaaataattggagcacatgtctatttgggccaagaggataaaggccagtagaggaatcagatcaaagaagtaagtgtaatgtatatttcagcatctctaacttgcacttacagtgcattccttttatttataatcatcatgggaagtaaatttgtcactactctggtcatgcactggaaaattatataatgaacaccgattttctgtgtgccatggttgagacagattatagtgtcaaaccaggccatcgtggctctgatcctgtccaatgcaattcagaaattctcaactgaccttcatattatgaacaaatttctgctgtttctcagcatgattttcaggaactttcacaaacttggcagtttgcaatattgatcaagtcagagtcttattcaagtatctgttacagaatataaagttgggaattttcttaaaggtcaaggtgcaggttttactttggtacatttcatgaagaaattaaagtgatttttcttactcatcccccgaagattttgtctaagacaggcacagatttggggaaattgggagtgagggaagtaggagacctttatgggaagaatattcaatggggttaagccattgatgaccaagcacagagagcagggagggtgttgttaggaagatgggtaaatggaacagaaatgctcaggggaaaagcagcatttctttctgtgaagcactgagaacctttctctcttctttgtcactgaggggttctatcagtcagagtccaacaggagacagaaatcacataaaaatagagaaagtttaacataaataactaataggggatttcagtaatgaggaatcggctaatagaggcatggagaatgcaaacaagtaaagaacagtagacatagggagagccacaaccctggggctgggatagagcacccaagaaaaaggccactcctccaggggctgagataccaactgtggaggggcatggagcagttcactgtggcaccgctctggtgggacttgctggaaatcctccccctggagttcgagggaagctgtcctcatgaaggtgctgtgcctcagaactctacagactgtgggaagctggggaaactgttttgggggagaaaccatgctcactaatactctattatgaagcttcctcagggaagtgtgcagagaactg

SEQ ID NO: 2314 - DNA, 32249 bp, Homo sapiens
gagattttatcgggagcagtgaggtgactttggcagctaacaggccactagtatcctactaaagcttttgtctggataggagcaacatgcatgtttacagtcttgcaggtaagagaccttggcaaataatcctcagttaccagaagatgtatccataactgcctagcttgcctgtcagtttttaatagctaaagatataaatctgggtaatctaactcaaatggcttagtttcattttaactcaaatgatatggggaattttatgatcttgaaagagcaggttttgcttcgagaagccatttcttcagtatggaataatgagttgtcaggaagattgagtacaatgggcatttgccctggtcctaatcaacagcatttggacccagaggaagccagctatttttgtaagggccatttctcatcattaagtttccaagtgcttttttagggtttgtctagtaaaaagcactattttgaaaaacaagcatagtaagggtagggggttgtggcatttaatagtacgttttaaaaagctaatggaaatacttttaaaacaagatttaggacaaattccttaggcatcagtcacactaatgcatcttctgagtcaagaactggctatcctttctgtgtactcagtccggaattgcatgtggtgggtgcttacttatttgcagtctcaatcaagaattctcactctcaagatagcagaaatagataagcttcaactgacaaatttggtacagaagtcatggaaaggaaggtaagtcttttgccaggcatcatgccaggcatcagcatctttcaggactaaggaaacaaaagaggaaaactcgattttactacatgttaactctactgaatacctccttgaatgtcagattccttatctgtaaaacaaaggttttgcatttgattatctctaagatccgcttctgcccccagttttaaagtttgatagggaaagaggtttaagtcaggataccaggccagggaggaaaggaagggagggcacaggcctctggagttcagctgcctcccccattaggattgaagtcccagctgctggctactgccttgagggaggtatcagccttttacttctggatcttggcctctccttgttctaccccttcccaacaacaactgaacataccaagtgcttgctatggcccaagcactgttgcaggtgaagctgcagcatgaacaagataagcaacatctctgctccccaggccctctgcagacatgacacctgcgggagacagacactgagcaagccagtggatacaagaactgggaaaatgagaagtgctatgagggcaagaagttgcaactgttttcttagctacctggagggagggaaaatcattttctggaagtttttttctatgagttttgtcttagctttggctgtcataacaaagtaccatagacagtggcttaaacaacagaaatgtattttctcatacagttctggaggctggaagttgaagattgggatgccagcatggttgggttcttgcgagggttctcttcctggctttcagatggccgcgttttcactgtgccatcatctggcagggagagagagaacacatgaactctgatggctcttacccagacgctaatgacatcttgaggcctctacctcatgaccttaacccagttacctcccaaaggccccatcttcaaatgccatcaacaatggggattagggcttcaacatctgaattgggggtggggacacaacattcagtccaccataaatttgtcataggaacctgaagatgaggagccaagcacagtttttagaatttgcataagttgtagattactgtaattattgtttttgcctctatggctgagaaactttgggtcaaaacgagccttttagaatgtatgaattagttatctaggtagccctgaagttggctctagatttattagaagctattttaaccattgcattcactcaagaaaccaccgcctatctgtgaagcacagtctatctgtaaagctccctcacaataaattcatctcagaaatatgtagtctctagtgtgtgcccccaactgctgaatgggtaggcctagctcagcacagtcattcgggcattaaatatggcagaaatgtggtccacctcatgacgtgcaaacaacagttggcttgtttaatctgcactgctttgccaaggacgtgtgatttgtgaggtgctggaggggaaccaattttaagagtcagcctgagtgtcagcctcatctgtctgctctgacttttgtctgctctctagcaggcactccatctcccttttcaattttctaccctggaagtgctcccctccagggaggaagatgagtcagatatgcagctgtgatgctaaatgattcaatagagtcaaaaacaacacagaacacaggaaaacgcattgtttaatctgactcaattacaagtgggcaaggtaggtgatggagggcaagtcaaaagcataacgatgtcaagctttggtagaacctagcaaaccggaagacttcagggtgtttggaaaggaatgtgtaggggaaagttgtctaaaatgctgtaacagctttctgtgttgctcttctcactgccttagaatttagagtcaaaataataatgatcttttcttcttttagatagccttcctggcttcaacccacaatcagtctagattctagacagtggttctcaaccctatcagagtcaatactccagtctttaacaactaatttgaagtgttccttttataacaaaaaccttaatgtattctttattgtcctactataacaatgttgttggtccctacccccaccgcataccccttggttgttaccattttggtgcactctgagcccactccagctgctagcccctccacttcctatccgaaggtatacatgttgcatgctggaagagtcagaaataatgctctctgggaagagctcttaacctgttggctctaacaggggccaagagagtgagggtatttatataccaaggttgccattggtgtataaaaaccctcatgttgccattggtgtgtaaatactctcactcccttggcccctgttcccccgtgggattaagctctagttgcctacagtggttacttcttgatgacaacctattactggctttttcaccttccctgcctcaataccctactccccattgtatattaaaccagtgcaaaagtgtcttgtgtttatatgtaaagaaaagttggcgtctggattcagataactacaggttttattgtttttcagtgacatgatagttcagtgggacatttgaaagctatacagggcatgaggcgattcttcactgtgtagggcaacttgtggaaaactttgcttaaagagcagtaggcatattttctttgcccgtgttttcttaatcccttcctcccctaccctgttggccgaaatgtaggcgtgatgactggagctgcagctgccatcttggagcaggtagacagaaccatgctacaccctagggtgacagagcagtagccggaaggaacctattccctgaggacttcgtggagcaaggctgccctattagccctggattctctctgtctctgaactttcacacgaacaagatataaactactctgctaagccaaaattattctgggtttctacttcttgaaactaaatctacctaaagcaataccaaaaataaacattaaaataagcatttcaaactagttttcaaagactggtattaaatctgatagggttaagaaaactgtctaggccaggtgcgatggctcacacctattatcccagtgcttagagaagccaaggtgggaagattgcccagaagttggagaccagcctgggcaacatagtgagaccccatctctacaagaagttaaaaattagccgagtgtggtggcacatgcctatggtcccagatactcaagaggctgaggtagcaggatgatttgaacctaagaggtcgagggtgcatgatcatgagccatgatcatgccaccacacttcagcctaagcaacagagtgagaccctgtctcaaaaaaaaaaaaaaaaaaaaaaaaagggaaaaagaaaactgtccagactctatacaaattgtaggattgagccaggaaagcactctagaaacaaaacaaaacaacagatcgttacagtgttgtctctaaattccaagagtgtgcctcagtaataacccataattcttgcaactgtgaccagaccagctagttcttctatgaagaactataaggtgcaatgagaggaaatggggcacctgagtggagctggtccacgcaagacttttctgagctctaatgatgggtaaagtcaactgggtaaagaggtggaagataaataaatatagtatttgtcatttacttctaaaaagtgggtaggtgtggtttctaggaaatcaattcttctgaaaggctaaaaaatgtgtttaaaacatggagttagggggagcattttatgcaatagtcgttttctctttcacgccactggtgatggttaagagtaggcaccacaggggaagactgtgtttcatttgatgtgtatcccagtgtgtagcacagggcctggcttgctgaggaaatgctattgaaaatatattccagtgtgctgagagctggtggccagtgggactgagtgagctgtgtgccgtgtattgacccgcttcctagtcctgaattcctttcagaagctccggcagggaggatgatacagtcagacaaaggagcagatccaccagacaagaaggacatgaagctttctacagccaccaatccacagaatggtatgtgtcaccaggactccttttctagaccagaaagtaatatcacctctgacatgtgatcaaatgaataggcagaaatcctgacagacttactgtgatccctatgaggatcttgtacatttttggttgcactactgccctaccagtgataactttaagaacaaatttcaagccaggaaggaaataaatggacatgatggattcaaaacctttttttcccttacctgacaatgttttatgtaaaacttagaacttcttaagttgttcacattcagaatatcactacaacactgtgaaaatactgtcaaaaaatagaatattcactaaaatctgtttagagaccctttaatcaggagaatactgagctttgcattaaatctattgggagttagaatttttcaatatcactctcaataagaattttttgagaggatgaaatgactcttatgtttgagttagagaaagaggatacagaacacaagtagataattttgggataaacgacaggctggtaagatgggggaggggaaagcaatcattttcctttcatgacatcttacatctgcacatcacgatctattattttactcagtgttaagaacaacactatgacaaagctagcaccttctcatcttgggcaaagaaactgggtttcggatagctatgtgactttgtgacgttcacaaagtaagaggtggaacagggcttgaagtcagatcttttggcctgagatccagtgtcatttccactcctggtgagaccccatggcatgccccagctatctgagttgcctttcacatttacacccgcacctgccaccccatctctgctctcttcctttcctaggcctctcccagatcctgaggcttgtgctgcaagagctgagtctgttctacggcagagatgtgaatggagtgtgtctcttgtacgatctcctccactcgccgtggcttcaggctctgctaaaggtgagtgcttctttgctcggaagcctttgcttgctgaaggggttgtggggagtgtgtagaaaatgacagcttcagtccattcaggctggatagtggaatagtttataaacaacagaaattgatatctcacagttctgtaggccaggaagtccaaaatccagtcggcagcagattcagtgtcttttgagggctccctctctggttcctaaatggtaacttcttgctatgtcctcacataatggaaggggctagccagctctcttggggtctcttgtataagggcattaattccatattcatgagggcagagccctgatgacctatcggctcccaaagaccttacctattttttttttttttttttgagacagagtctcactctgttgcccaggctggaatgcgctggcctgatctcaactcactgcaacctccgcctcccagcttcaagcgattctcctgcctcagcctcctgagtagctgggattacaggcacccaccaccacacttggctcatttttgtagttttaatagagatggggtttcaccatgttggccaggctggtctcaaactcctgacctcaggtgatccgtccggctcagcttcccaaagtgctgggattacaggcatgagccaccacacccagctagccttaccttttaatatcatcacatatgcattttggaagtacacattcagatcatagcaactacttacccaatggtgtcatttatcaactggtaggaaatttcaacttggaaaaagttcttagaaggcaactctcagagaagagctacacaaacttcttcgcttaggaaggaattaacttaggtggaggagaatatggtagtcccttccttttctccccacagctctttttcttccagaggccccctggaatcacaaaacagccaccacgatggtcattggcaacactttatcagctggctacaaccgtttgtccttgcagcaaccctggataaataaaagtgctttaaaaagttattcctatttgtttgttaaagttagaaagtaaaatatctacagttctgtttaggtaccctgaagtttcttattctaaagtttcttctggcccagtgtgatggttcatgcctgtaatcccaacattttgggaggccgaggctggtggatcacctgaggtcaggaggttgagaccagcctggccaacatggcaaaaccctgtctctactaaaaatacaaaaaattagccatatgcagtggcacgcacctgtaatctcagctactctggaggctgaggcacgagaattgcttaaacctgggaggcagaggttgtagtgagccaagattgagccactgcactccagcctgtgtgacagagagagactccatctcaaaataaataaataaaatagaataaataaagtttattcttttttaatttggctaaaattccatgcactatacaatagcgtctaatagatagtagaaaaatagcatctactatctagtagatgccactactataattttgttgttctgaacaagtgttattattaagagagatccttttgaagttattttttgggatgtgggtatttccttcacttaagtgtgaaatgtggtctgtcttatagtgcatgttaatattatacaataaaagtggcaacatctttggcatgaatgaagtactcctcatagcacctgttataaaacacctgatttctatcaggcattttcccacaggatcagctaagataggagttttaatttcatgatgggcattgcctttgctcaccactgctaggcccttggtgagttatccaatcagccttcatcacttccaggtaaacctgaatgcgggccctgggatagagcagggaagcagcatcatcactaatctggatagaaaagactgggggctcagccggccccttgggccttatttcttcgtctgtaagagaaactcaattcctaaaataagatcaaggggtgcattgcagagctaggcaggctttggtgtcctcagcccaaacctagatcttggtatggaaaaaaattcccaagggtatgtggagatgaagttggaattttaaaaaatgaacttgtactagagaattaggagaggaatgggaaacagccccaaagcacaaagcagagtacagagaagcgtttgtggcatgcccaccacttattcagaaccttcagtggccctgagccacacagctcacatgctgcacaggcgcccaacacaggggtcctcacaggtgtctggtcctaaagggcccctcctttaagacgctcctttatgcatcatctacaaatccccattggtttcagtcccagacaccctaccctcactctgtttaacaagattaaaagtttgaatttctttttattactgaaatgcttggagaagatcaatttcccaatggcagccaataattaagcttttgaagcatcggggccaccaaactcaagttcatttctctttggcaactagagacacaacttactaaacaccaaccacaccgtgctgtgcagccattggtgcagttgcctggggtgtttcttctctttgagagtcttaaatccaaaatggcaatagtcatattatcaatatcaattctccctcccttgtccttctgcagatttatgactgcctccaggaatttaaagaaaagaaactagttcctgccacaccacatgcacaggtgttatcctatgaggtaaggagattttattccacaggatagtagagctctgatgtggtgccattttccccacattgctagttcaaatgaattaaaggttctaaggaaaagttttattgatgactatgcatctaataaatgtttctaattgaactttaatataaggaagaacattggctgggtatctccccaaattaaaacactccccaccaccacccacgtcatttttagcgtgtgttcatttctttcttttttcctaagtctcgtactccatttgcccttcataaacagggtaatgttatagtaataattctcggatttatatctctagcctggagatttccctaaattccagtctcaaatatccaaccgcctcctctccatctcacttggatgtctaacggactcctccaagttcacatgttccaaactgagctcccgatcttccccacctgccgatcacccccacccactcttctggaagccttttctatctcagaaacgatacctgtgttcttgcagtgctcaggccagaatcttaggggtcatttcgactctctttttctgatacctcacacccaatcagatagcaaatcctctcagctctactttcaaaatatatccaggatctcaccaaaatatatccaggatctcaccaccccataccatcatcatcatctcttacatagatagttgcaaaattgcctcctatctggtctcctgtgtccactcttgctcctctacagtctactctcaacacggcaaccaaaaataccctctttgaaagcaagtcaaatcatgtcacttcctcactaacactcaaacccttcaaatgacttcccatctcagagtaaacaccaaagctctttttttgttttgcttttttgtttttgatacagagtcctggtctttcacccagactacagtgcagtggcatgatctctgctcactgcaacctctgcctcctgggttcaagcaattctcgtgcctcagcctcctgagttgctaggacaacaggaacccactacacctggctaatttctgtattttgggtagagacggggtttcaccattttggccaggctggtctcaaactcctgacactaagctatctgcccaccttggcctcccaaagtgctgggattacaggtgtgagccaccacacctggcctaaacaccaaagttcttacatagctgaacacaatcaagctgctgttacctctttgacttcacactcaatgctttctccattcactctgttccagccacattgaccccttgttattgtttaaattcatcaggctgggtgcagtagctcatggctataatcccagcactttgggagcctgaggcaggctgatcacttgagcccaggagttcaagaccagcctggccaacatagcgaaaccccatctccactaaaaatacaacaacaacaaaaattagctgggcgttgtggtgcatgcctgtaatcccagctacttgggaggcacgaaaattgcttgaacccaggaagtagaggttgcagtgagccgagatcacaccactgcactccaacctgggtgacagagtgagactatctcaaaaaacaaacaaacaaacccaaaaaacaaatcatcaggcatgcttctgcctggggccctttgcactcgccattccttatgtcagcaatgctcttgcccagatatatacctgatctgtccctcatctccttccagtctccactcaaatgccaccttctcagtgaggcttttcctggtcacctatctaaaattgtattccctcctagcacttcctagccagcttccctggtttatttttcttcttaacacttgtcaccatcaaacaaaactattttacttacacatttcatttgttgtctgtgtctcctccctagaatgtaaactccatgagaatggagatttttgtcagccactgctgtttttgcatcacctaaaacagttcctagcacacagtagtgttcaataaatatttgtcgaatgaatgaataaatataatccattttattatttattgcccatcccatattaaaagaaacagcaaaaaagaaagaaaaaacttctgctctcaattccagtaatcaacaattcaaattgttctcagttgtccacaggaaaagcacatatataatattttattcagttgaaatcccagtgaatggaggtaaacctttgtaaactgcttgttttcatttgactgtaggtaatggggctgactaaagtcttgaaaggtcttatgtcctctgaaagcaggtctacgcctaaaccacagcagagagagcagaatttttttccgcttagcactttttattgtaacaagcattaaaattgctaatcaactgatactctaaaagagaaattatgatttccattttctatttgaagaatggagcatcccatgggattaagctctttgagttccccaggtacgttcctagagaaactcatacagcttcataagcctgcaaagcattgacatcagccaacagctattatattttagaggcactagaggaaaagtgccttggttcatatgctgttaccaaattggtacatcctccatgcctatgtgccaggattgggcattgggtttagatccatctcaactcttgaattctatttgctatattaaagtagcaattttaatgaataaagaaggatggtaggctttaatggatggctttatagatgaaaaagaaggctccagtaatagctttttaaaggtcaatatcatgttagtatgtatgttatccagcctgggtgaggttaagtaggtgataaagattttttaaaatttttataatgtatccttttccatgaaccaggtagtggagttattacgtgaaacccctacttcccctgagatccaagagctgagacaaatgctccaggctccacacttcaaggcaagtgcctgctaaaatagaaaagatgtccccatctggcacatagacaaagttgggaaggagaaatatatgtgatggaaaatgttctctctgaatagatgttctattactgtacacggttactgaccaacagattgtacttaaatatgtgggactcagatgtgactagctcagtgttgtcaatcatgcagtcaagcctgctgtgtttatgaggaggcatccagaactttccatggtgctttgtttcccctacaaagctattgcccatccaaaaatcttgggtagcaaacagggaatgttctagttatagaggaatacctccatgcttcctttccaaagtgggactattttgagttttagataatgtgtgtgtatttggaatatacagtataatgatgattatccctgtgagagggtttatgaagaacatttgattgcagaacagaaacctatctcttagtacttacagatttgagaccaatttatcaataaattagaactttaagacaatgtctgtatttggagtgctgaaatttatcagtcaaaagttataattcacaacacaaccaccagtcatcaaatatcctcaacggcacgcactacttagagaattttctgagttccaactaaattgtgtctaccaatctcagtcagggtggcagagtgacagcttctccagcccgtgaaatgaagaatttaacctagtggactagtcaaagaaactctttgatcataccctatgatcataccctatgatcaaagagcttgatcatatgaactcctcattctgtaccacatgagcccttgagtgttactaacaaattaaaccagcaagatattttgattgctgcccttcgttctaccttaattggggaaaatattataaaagttgttttgtagttcaaactccacaggggcatcacagattacatgggctgccaggaaataagaatgtcgtggcataatacattttagcagaaatgaaagagtgtattgtgcattgcttaacctctctgtgccttatttccttatctgcaaattgaggacaattaatgtacctgcctcatagaattattgtgaagatcggattaattcatataaaatgcttcgcactgtgtctggcatgtctgtattggtgtttgttgttgttgctgtgtcttagatagtattgagttactatcttctagaggggtttggcccatgtgtgacatttgctcaccttttccttccctgtgcccaggccttgctcagtgcccatgacacgatagctcagaaagattttgaaccccttctccctccactgccagacaatatccctgagagtgaggaagcaatgaggattgtttgtttagtgaaaaaccaacagcccctggtaaggaaatcattttttatctttccatttagggtaagcttaggttaattgtgaaccaaattatatctagtggttacttgggcagtagccttgcctgcgatcacatatacagtgataataacggctgtcaactctgcaagttttgcctgtggtttcaaacatattacatgtcacggtgttttctctaaggaaagatttcagcttagtgtttttcttttgtgaaaagtaagatgagatttataagacatttttgtgagaaataagacatatgttttattttaatatttggctttctgacctatgcatgtatttccctcaattccattgcatttgcctatttccttatattaatgagaagctaaggaaggcattaatctgattttctaagaacagtccctctaattaggttttaattgtgggaggtttctgtatctttggatgaatctaagtattcttttatgtctgtgtggttgaaatgagactccaggaagccaaagccgaatggcctttcctttttgatggcatgctatgactgacaggccacagggcactgtgtggcccctccgtccctggttgcctgaatagccttgtttgaaaaaccagagctgcattgattgaaagaccagagctgcattgattgaaagaccagagctgcattgattgaaagaccagagctgcattgattgaaagaccagagctgcattgattgagggaagccacctggaaaatggtcatgtcaggtaacagagggatctcgtctattctctcttcagggagccaccatcaagcgccacgagatgacaggggacatcttggtggccaggatcatccacggtgggctggcggagagaagtggtaagctggagcagctgggattgagagttaccagaaaaacaggaaacccttgactgtttaggcttctttctagagaaatcccttttttttctttttttttttctttttttttttttgagatggagtcttgctctgtcgcccaggctggagtgcagtggcgtgatctcggctcactgcaagctccacctctggggtttgccattctcctgcctcagcctcccaagtagctgggattacaggcgcccgccaccacgcccggctaattttttgtatttttagtagagacggggtttcaccgtgttagccaggatggtctcaatctcccgacctcgtgatccgcccacctcagcctcccaaagtgctgggactataggcgtgagccacacacccgtcctgagaaatccctctttcttaacttgggtcagggctttagtaagttccatttcttggataaagcagtaaagaaagaagaaacaaatattccagagaaatcttactcctctccttcactgagtccttcccattctaggtaccacattaaagtctctcagtttacattctcatggcaacctcaaaggtaactattatcatgccattgtatagatgaggaaactgaggctcaaagagattatgaaactaacttgctcagagttacaccgtttgagtcaggattcaagctgcttagctctatattcccaactttttctctgcactttgtccttctactttcagaaaggcatagctctttcccatcttgaaatgccttttgctcacactttcaaccagttaaccagattttcatcctttcactgctgttcttctaaaaactttttttttttttttttgagacagggtcttaatctgttgctcaggctggagtgcaggggtatgatcatgactcactgtagcctcaacttcctgggctcaagcaatccttccacctcagcccccgagtagctgggtccactggtgcacactaccatgcccagccaatttttctattttatgtttagatagggtctcactatgttgcccaggctggtgtcaacctcctgggctcaagcaatcctcctgccttggcctcccagactgttgggattacaggtatgagccaccacacctggctactgttgtgcttctgaaatgagtggttctatacctgttatacatcttcactaccccgaagccctaaaacctagcacatgctttatacttcaacattctcattgtaaataccaagaatttcctagttgctaagtccattggcccttccttcctcctcagttttcttttcttttctttttttttttttgagacagagtctcactctgtcacctaggctggagtgcagtagggcaatcacagctcattgcaacctctgcctcccgagttcaagcaattctcctgcctcagcctccaaagcagctgggattacaggcatgtacctccacccccagctaattttttttgtatttttagtacagacagagtgtcatcaagttggcaaggctggtcttgaacttctggcctcaagtggtccacctaccttggcctcccaaagtgctaggattataggcattagccgccatgcctggccctcctcagttttattttcacttcttgaccacatctgatgctgttgacacctttcttgaattttttatcatgcttcgtttctgttctataacaccattccacttcttctctcaactatctgacaactccactgttttacctcacatttctcaagtcttcacttaaaccccaagtttctccacattttctcttttgaataatacctaccccatttcctttttgttgttgacttatgaccctgacatctttggatttagtgctattttcttaccagcgttctggttccattttacaacatcagactagcaaaaataaaaatatgaccataagtcaatgccaagtatttatgacgaggtagaaaaatggactgttcacacatttctgggggtgatgtaagttggaataaccagctttcttttctattattattttatattaaacatttttagagcatgcttgggttagtgagttaaatagctatcgaggtagctactgctatttttatcctacttctttgtatctttctttgttttttgttactgtctgcctagggttgctatatgctggagacaaactggtagaagtgaatggagtttcagttgagggactggaccctgaacaagtgatccatattctggtaaatcttctttttgcctttttgttaatgacttggagaaatgccaaggctgaactgggaccatcaagcccacgtgtgtgcactgggatgtaccggggactcaagttctcttggcagctttctccctccaggctcccagaccttgtctgtcacccatgtcacttgctgacctccctcctctaccccgagaagttctggtcctggctgggaaacttcccgtcccaagcagctccttcctccttcagccacgggaagactgccagggcccccagcccagctccctcatcacctggtttgctccattggaaactgaacctggggtggacagagtgagacttagtaggagagtctgaacccaagcaaaccactccttcccccactaacacttttctatggctgaaatgttcaacatcttcctggagggcagcctttcttatagtggatagaccagtggttctcaaactgggttcctgccaggatttcatagcagtggcttagagactgaggcgaggagtggtgctatgagacaagcacctaaatcctttgtaagccactgctgcaagattctgtgtggtatagaatgtgctgcaaaggaagcttgaagtactagaaatcacagatatgcatggcttctaccccctggtgccagctgtgatgttgccgggacagtgggattttgaaattcctgagtacaaacggggtcttaatctctagatgtttaatgcccatcacagtgtatgtaacaggggaattcttccttcccccggtctgagagctccctatttcctctattagtttggaaggttgtcagttctcccagaaaacttaggagcccctcttcttccccatcagactggggtatctggtgtagaaacaggcattcaggaaatgcttactgagtaagggaataaggagggaaagtcagatggagatcctgtctctccccagggcctgtgtgaggaagaccttgctggtggggtgtttctgtttcagtgtagggtgggggggggtccctggaagaggccacttcagtgtggcttttagcagaccagcgaccccagaaccacacagcagggcagatgcaggggtaaattgcttcctgatttccatttctggatggtgacagctgcagagcccttgtgaaaggctcttgggggattttaccatgagacctggatacattgcactgtaactctgtccaccgagccccagtaaccctgctagctccatgattgtcatcctttctcctctcttattttccaggccatgtctcgaggcacaatcatgttcaaggtggttccagtctctgaccctcctgtgaatagccagcagatggtaagaatttactgagccttcaatctcacacacagtaaatccccaagtaacagcaactaaatatgatgcgtaataatcctatcctttgtactgtgttggacctggattcaagactgtgttggatatttttcaatactgatggcccgagaagcaaaataagtaaatgagtacagtacaaggagatgggatactaagaagtcaagaagcaacataaaaaatcatgaacatttgagcctaaacttctctaagctaagagattctgttcccaaagatgctttttatcatggtacttaggctcaggaggcgagttctcctttttggtgagggtggagaggaaagataggagtagcaggtggaggagtgggagaaatggttttaagtcatgatggcccatgggcaagggttcttcggatggcaccattaggcaccttctgatagcgtcattatgcacctgccatcaggtgtacgtccgtgccatgactgagtactggccccaggaggatcccgacatcccctgcatggacgctggattgcctttccagaagggggacatcctccagattgtggaccagaatgatgccctctggtggcaggcccgaaaaatctcagaccctgctacctgcgctgggcttgtcccttctaaccaccttctgaagaggtaaggaacgtcaccactcctggactcagggctgaaccatcaggaaacaaaatgtttttcttgggtttctgttacctcaagatgagataaagagggacaagcagatgaatgaacacacacacactggtttataaatccaaatgtcaacttatcgataaaccctaagcatcttaaataccaaggagacgagaataatcatatcagctagaaaacagggaaaagtcttgggaaactaaattaaacttaaaaagtgctatggcctgaatgtttgtgtcctctccaaaattcatatgttgagacctaatccccaatgcaatagtattaagaggcggggcctttagcaggtggttaggtcatgagcactctgccctcatgaatgggattagtgcccttataaaagaggcctgagggagcttattttccccttccaccatgggaggacccagctaaaaggtgccatttatgagtcacggagtggccctcgccagacactgcatccactggctccttgatcttggacttcccagcttccagaactatgagcaaatacatctctgttgtttgtaagtgacccagtttacggtactttgttatagcagcctgcacagactaagacaaaaaaggattcatctttcaaggctgagttgagacctcaatttcaacccaccaccctcaccttatgctactgagttttgacaagctaccaagggagggcgtgcaaatagaaagaagcagcagtcccaggctcagccactgttaagagatcaagaagaaaaaatggaaccagtaaaagatattgagaaggaatgaccaacgaggcagaatgaaaatcaagactgtatggggtcctcatcagctatatcaccttctgctgggaaggctgagaattgaccactggatttagcagtatgacagtcattagtgatcttaataagagcaatttcagtggagaagtggggccgaaatcctcattagagtgggatttgaagaaatggatgacagtgagcataggaaactctttgagacattttgggaaaaagcagagcagaatgatggagaaatagccagaggggagagtggagtggtgtgagcgaaatttttagatggcataagtaatgggagtcatccaccagagggaacattttgatgataagggagaaacagaagagaattgctgttgttgatgtctttgagcaggcggtaggagatatgctttagtattcaagaagagagcttggcctgacctaggaccataaacagctcatccatagaaatggtaccacgagggaagatggagtatggggcacagctgagggtggagcatatggcaggcacttgtggaagttctctcctaactgttattttctcagtgaaatgagaaatcataagcagagagcagggtggggaagggggcattgggaaggagagagtagaaagcttgaaaagtttccatgagagttggagagcaaacagattaggtaaacatagtgtgatcagcattaaaggccctcttaagttaaaggtcatatatttgaagtgcttctggggtgcgggtccagattagacagagggttggatttaacagcaaatcaagagggggccaagggacagattataaggatggagtgtgacatgtaagctgtttaggagggagatgaggaaatgaagcaggtgaggattggtgagaaggaagtaagatcaatggattgcaggtctttatgaggtcaacggtgtattggggctgggaagatgggaagtgttagtaggagaaagggatgctggaagttaaaattaaggagagattgctgttgtcagtactgatgaggtcttgggtatgacaatgggaggcagtggctgaggttgaatgagggaaaggttattggaaaagaggagatcaagcacccaataggccagggtgctgaaagggacatttgtatgtgtgataaaatcattgagaactgtgacagaacagtgttgagacctaggagtgagcaggagtgagctggcgatggctaccagaaaagtagtgggatgatgttcaaagctgggggctcctagggaagaggaagaataatctggaaatggcagtgagaagcaaggacacaccccccacctccaggcccagtggaaggaaagctatacacaaggatgtgctggagccatgtgacgcgagccatctcttcacacacccacgttcagtgaagacaggatggtagcttgaaatcagccaccgtgagagcatcaacactgtagaaatcagcagagcctccgagtcagggcttccatcccccagagctatttcaccagcaccccactgggcgtgggagaggaaacatccccctcttgaaggctgcaggagaagcagaccacagggagagttgggctgcagttaaagcaagaagaaagggctcaaagaagaggctgaggtctaagagagtttgctgaagatttgctgtgggttccagagggcgtgggtgggtggaaggggtcttatagggattaaagcacaggggataaggggtgacctgagcttgggggctgaaggacatgaacagggataaaggcctaatgagattagtcctcatggtttcaggtcagaaagtggtgaggagggtctggcaggggccttgcaaggagcacacaaaacccaattatgggtttcttgggggggcacacaaacaaagaatgataggaagttctcatgctgcttttagtcattgccacgtgaaaacctaatatgaaaataagaaattaagcaatttcatttagaagcaatatgtcaatagcagagtctacacaaatgtcttgttggggacagaataatggaaggcacctcggactctcctgaatctcattcagaaaaccaggaggcacattggaggactggaggagggtgttgagactaaatccgctgccatatctgggcaagaggcctgccccgagcgcgggctgatgtggcttttgagaagtcagtatctctgagcctcaataaatgaggtctttgatatctacaaacaatttttctctcttcctacctctccaactttgctatgagtaaaaatgagctgggtattttgtaaaatacggattccccggctctgccctcccctctctgaggatctgattcaatagatatggactgagccaggaatctgcatcttcaccaagcgcctcaggtgctcagggtaagtggtatgaagagcagcattgtgcttaggaatagtgaatgagcgcataaaatattttttaaactctttataagagtgacagatttgaatgcaagtagctgggggggttttgttttggttttgcttgtttgtttttactttcaacaggtagaaaattatatctgattttagaaaactgtgaaagagtgaggaggaaggcttctccaaaaagggcatattggtggaaaataatacccatctaaaggagtttggaatgactctattgcaaattgggggagttagatgttgatggtttgtgccagagtagcaaatatttttggcaagtagacgtgactttccagtgagaggccccattcgctggagtttcccccagagggaacatgtgaagatgtacaggatagcattttgtaagaatgaaaaaccaggagctcccagaggagaaaggccagggtgaagcctagagaggaagctgatagagaatgagagacacagagacagagatagagagagatcagactaccaggtaattaaccatggagtaaccaaggaaaggtacagaaggttaaaaaacaggaaacacagatatttacagagctcatcacctaactaggaatcaagaatcttggctctggcctgcatgtgctgtgaattaaagtaccttaattatgcagagaatatttctggaagaatgcacaagaaactgagcagaaggaagggaagaagccttactttttaaatgtttttattttttgagatggagtcttgctctgtcaccaggctggagtgcagtggcatgatctcagctcactgcagccctggcctcttgggttcaagccatttccctgcctcagcctccagagtagctgggactccaggtgcgcaccaccacgtccaactaatttttgtatttttagtagagatggggtttcactgtgttggccaagctggtctcgaactcctgacctcaggtgatctgcctgcctcggcctcccaaagtgctgggattacaggcgtgagccaccacacccagcctacttttttatactgttaagatttttactctgtgtatatgttatctcttcaaataattaatgaatctgaatgccctgcatgtccatgctaattgagtttacagtaaggtctcatgtattatttagtcctcacgatgccaaatgcgctgagccccatttcaaaagtggggaactaagtttcagacattaggagatttgtccaagatcctaaggaggggaagcatgcctggaacccaggtctgttgaatcccagtccatcactttgtagattatagcatagatgcctcctgctgctaactgttcaacctccaccacattgcttgacttccctggatcagtttcctcatttctaaagtgaggaaggtggactaaattggcccttcttcaactctcttgtgaattagaatcacatggagagtttgatttaaacatgtagatgccctggccttatctccagggaattggaggcaggagctctgggaggcccagattatttgcattttaacaaacacctcagatgtattccaaagtttgagagattaaattagagcttgttgcctttaacatacatatgacttacctgggctcttattaaaatggagattctaatttggaaggcttggggtggagactgagattctgcagtcctcacaagctcccaggtaaaggtgatgctgcagttctgggaatacaaagaacagagtgtcttcgaaatcttctcttgctccaaacttcacagtgttgaataaagaaggaagagcaactttgcttagaaagttgctttgaagtaggcaaggcaaggaaaacctgcccaaagaaattgctgggggactcaagggaagaggaacaagtcaacagaggtttcaggtgccaagaaaaggtgaagccttgccctggagcccaggggtgatgctagagatcaagaaaggagcagagtcatctatagaaactgtagagagcctctaatagcctgagagggaaacctgaacatgtcatgagaattcgaaggagactgcaaagacaggctaacatgcctgagaggcagcttaccacgggtcatttactgaaactccatgtgcaaacttgtgatcatgtgcgagattgtcactgtaagtctttgttgttctgaaaagatcccgtgaggcagaagaagacatgagagagcctatatgtttggaaaatttatttgacaatgtatttggagaagcaatcacccttttcacttgagtgaaggcagcagaattctaagaaacattctgtttgtcgttgctctgggtctgtttcatctaggttaacaaagagtggtttttgtttgttttttgtcgcatggttttttcccccccataggaagcaacgggaattctggtggtctcagccgtaccagcctcacacctgcctcaagtcaaccctatgtgagtattgcaactgcccgacaggttcttcctgtttgcaataaagaccatggcattgcagtaaataaagagtctaattgatgtgaggctggccatgccacatgggagatggagttgttatttaaatcaatctccttgaagggccctagattaggggtttttcaaaggtagtttggggagggcgtgggggtggtggctattcagtgggcacttgctactgattggttggatcagagacgaaatcatagggagttgaagctgtcctcttgtactgagttgcttctgggtggagccacaggagccattggttggtgggtccagatggagccacaggtgtcagacatgcaaaaaacctaaaaagatgtcacaaaaggccaatcttaggttctacaatagtaatgttatttgcaggaattattggggaaattgcatatcttatgacagtctacaccttagcagaattcaggctcctctccttccactaacttgatggtctctcattagctttataaaggcggctgagttttaggggaaggactgttatcatttaaactataaataaaatgtctctcaaagcgaaccctggaatgaaggcagcttgaaagctaaaagcaagaggagcttgggctagatcagatctcccccactaccataattttctcactgatgtaatttttacaaaggcaatttcagtatgtgtctacctcagacccagcatgtgcatcctgggagagcctgcttcctccctccagggctggcttcctgcctaggagatctctaaatgtccccactgcccccaaataatctccctggcagccagccatctgaagtcctaccgttgacattccttctttggatttagaagggttttcagtttatgaaaatgcatatgttcttatcttggtgacacctgaagacatccctccccaagttgaggccttccaagatctctgcagctcatatgtgcattatacctgactggcaagcaaggctgcataactacacatataccttcatttgggttctatcaacttagaggacttaaccttcacactgttcagaagcactgattaacaattgtgtatgcctttggtgaataaatatgggatggaattgttacttaatgaatgcagtttgattgctagacaatattattcaagcagctggggagtggtgagtaaaggctccatggtggcaaatgcttgattaaaggtgctgtggcttggcagaggccagctgagcctactgagcgaggcccttctgaaatggccctcaggtgggccctggaaagggggtaagggagggaactgggcaccagaaggacggaggggaggcaaagagaggagactggaaggacacaaaaagtatcaacatcacagatctgcccggggcaagcctcacccactttattatgtctcccttctccaagccaaaaattacttttccttttattttcttattgaaaagatgtgaggacaactataaaggcagtttttgacaaaagaaaacatgccttctcaatgacaatattttcatattaacttccagtggtgaacacatattttagatggttatagtaatagctgcaataccactttttatttttttaaacttaacatctttttttttcttttttaattatactgtaagttctgggatacatgtgcagaacgtgcaggtttgttacataggtatacatgtgccatggtggtttgctgcacctattaacccattatctacattaggtatttgtcctaatgctatccctccccttagcccccaccggccaacaggcccccagtgtgtgatgttcccctccctgtgtcgacgtgttctcatagttcaactcccatttatgagtgagaaaatgcggtgtttggttttctgttcctgtcttagtttgctgggaatgatggtttccagcttcatccattcccattcagtatgattctggctgtgcgtttgtcataaatagctcttattattttgagatacgttccatcagtacctagtttattgagagtttttagcatgagggggtgttgaattttatcaaaggccttttctgcatgtattgaggtaatcatgtggtttttgtcattggttctgtttatgtgatggattacatttattgatttgcatatgttgaaccagccttgcatcccagggatgaagccaacttgattgtggtggataagctttttgctgtgctgctggatttggtttgccagtattttattgaggattttcccatcgatgttcatcacggatattggcctgaaattttttttgtgtgtgtgtctctgccaggttgatggtatcaggatgatgctggcctcataaaatgagtgagggaggagtccctctttttccattgtttggaatagtttcagaaggaatggtaccagctccatttggtcctgggcttttttttggttggtaggctattaattactgcctcaatttcagaacttgttattggtctattcagggattcaactacttcctggtttagtcatgggagggtgcatgtgtccaggaatttatccatttctctagattttctagtttatttgcatagaggtgtttatagtattccttgatggtagtttgtatttctgtgggatcagtggtgatgttgtcccctttatcattttttattgtgtctatttgattcttctctcttttcttctttattaatctggctagtggtctatctattttcttaatcttttcaaaaatccagctcctgaattcattgatttttttgaaggtttttttgtgtctctgtctccttcagttctgctctgatcttagttatttcttgtcttctgctagatttttgaatttgtttgctcttgcttctctagttcttttaattgtgatgttagggtttcgattttggatctttcttgctttctcctgtgggcatttagtgctctaaatttccttctaaacactgctttagctgttttccagagattctggtacattgtgtctttgttctcattgctttcaaataacttatttatttctgccttaatttcattatttacccagtagtcattctggagcaggttgttctgtttccatgtagttgtacggttttgagtgagtttcttaatcctgagttctaatttgattgcactgtggtctgagagactgttatgatttccgttcttttgcatttgctgaggaatgttttacttccggttggtggtcaattttagaataagtgtgatgtggtgctgagaagaatgtatattctgttgatttggggtatagagttctgtagatgtctattaggtccacttggtccagagctgagttcaagtcctgaatatccttgttaattttctgtctcgttgatctgtctaatattgacagtgggttgttaaaggcttcccctattattgtgtgggagtctaagtctctttgtaggtctctaagaacttgctttatgaatctgggtgcttctctattcggtgcatatatatttagaatagttagctcttcttgttgtgttgatccctttaccactttgcaatgcccttctttgtcttttttgatctttgttagtttaaagtctgttttattagagactaggattggaacccctgcttttttttgctttccatttgcttggtaaatattcctccatccctttattttgaggctatgtgtgtctttgcatgtgagatgggtctcctgaatacagcacaccgatgggtcctgactctttatccaatttgcagtctgtgtcttttaattggggtatttagcccatttacatttaaggttaatattgttatgtgtgaattttatcctgtcaaagctggagtgtcccaggtcaacttcagactgctgtgctggcagcgagaatttcaagccagtggatcttagcttgctaggctccgtgggggtgggatctgctgagcaaaaccacttggctccctggcttcagccccttttccaggggagcaaacggttctgtcttgctggtattccaggcgccactggggtatgaaaaaaaacaaacaaactcctccagctagctcagtgtctgcccaaacggccgcccagttttgtgcttgaaacccacggccctggtggtgtaggcacccaagggaatctcctggtctgtgggttgcgaagaacatgggaaaagggtaatatctgggctggagtgcacccttcctcactgcaaagtccctcacagctttccttggctaggggagggagttccccgacccctttcacttcccaggtgaggcaacaccccaccctgctttggtttaccctttgtgggctgcacccactatctagccagtcccagtgagatgagctgggtaccttagttggaaatgcagaaatcacctgccttctgcattgatcttgctgggagctgcagaccagagctattcctattcagccatcttgccagccacttaacatcttatcagaaacatttttcatgacacaatctttgtagtgatattttagttacttcttccacgttttgaaaattttttttttaaaacaaactttcatttatcaaaggcacatgaaaatgctaattacagtttctaatcagcatctgataattacctgtagtataacttctggttttcatttaatttgcttatgtggcctgtgtgatttatattagactttctagaagtccatgctgaaaatagttttcaatattctattattatcctcacaaatatctaagtccacgagcctcaggtttggagccactgacttaaagggtcccctctcttagggaatgtttccggtagacatgattattttttaaactactagaaagatcatttattttcaactattatagatgatccttcaattaatattattttgtatgtttctgctctgcttaagtcttatcataccctcctccccccaaaaaaattaggggcaggctactgagtccaaagatatagggcaattttattaatgaaatgttattgatgttagtttgcagatgattattaaaatgttatttactgaaggtgcacttatagttgtcttccctctttctttcccttcctccctccctctctccatctctctgtcttcttcccttcctttcattgaaaatttgggttcctaaaatatgctgaagtaagcatgttaattcagaaattcatagaatgctacccttgtagaactagctgggatggaagaaggcgggatttaccagaagcaagtagatttccatttccaacaaggctcacaaatgtatcagttttataaagtattcatttatcattttcttactaaatcttccctgaatttctagagaataaacccagaatactaattacaataatttttgcacattacatttcttattgtaaattaatctgagaaaatatagtacagatactgtgttctttttatcccccctgcttcaatcatttgcttgtactcagcaatttctatggaagaaggtaagaaatagtatttaggaaaaaactcttatctccaaagtcttttagaaatttcttgtagtttaaagaattcactttaattcagttcagctatttattaagctcttcctatatacctagtagtgtgatagtcattattaagctcttcctatatacctagtagtgtgatagtcattgatttataaaaatatgtcattcaaagatatgcatgcaaagtataattgtcctaacactgagaggaataaagaaaagagaagcaacatttatatgcagctccagagtttaacatagcgtatggcaagaactcaataaaagctgtgaaactgatgagatgttttgtttcaactgctttatacatattacctaacaataaaactatagtgaaaattattattattattcccatgttatggatgaaaagattgacactgagagaaggtaagaacagttgtcagcagttgaaaacagtgtaatctggattcaagattccctctgtctaaaaggccctgcattagggaacaaatgggaccttcagttactatcctttccccttctccatgcccaaccatctggatgactcattatgatggtgctctctctctctctctctcacacacacacacacacacacacacacacacacaaagcaagatgctttctgcttccagaaagaggaaaaaagaggtgtccccttagccaccaaccacagttcatccttgaatttggaaagggaaaacagagaactgcaagatgacttttgaaggctgatctatgggaacaaggctccaatctgtgtccccccaaaacaaaaaaggtgtatgacacaggagggcaagagaagaaggtgagggagagaggggcaagtccagggtgcctgcttctggtttgtctactcagggtcatgttacaggctgcactgttaagagttgtgaagggcaacctgggcatagcccttggtgggagggaggagctgggaactgtacggtagtggtgggtgataaggccatggtcttagcttgagcttccgtaacaagataccacagactaagtggcttaaacaacagatatttattttctcacagttctggaggctggaagtctaagattaaggttccagcagggttggtttctggtaaggcctcttcctggcttgcagacagccaccttctttgctgtgtgcttatgtggtgttgcctctgtgcatccttagagggagagggagagggagagagaaagaagagagagagagagagaggaagagaagagaagagaagagaagagaaagagagagagatcgattgatctgatgtgttttttcttcttataaggccaccagttctatcaaattaaggccccagcagtatgacctcatttaaccttaattacctccttaaaggccctctctctaaatacagccatactgagggcaagggcttcaacatatgaatactggggggaacacaattcagtacattatcctagctgataatgtggaatcattgatttggggagaacaaaatcagtggccctatcttagatcccagagtcaagcgtcagaaaagtcagagcttctcatgctgttactagataatcatgcctggttttttgtaccttcctctgtaaaataaaaatgaaaattgtagtctttgtttgccctaaagaaaaacaactttgttatgtactgggaactaatgaactcactgttgttatggatggctaataacaatctaattatttaactaggaaattaaattaatctaattaattaggaaaataatctctaaatgaatataagtaaacaaatgacagtgcagaaaatctcaaccatgccactcgtttatctgtgtccctacctgtatgagacagtgttatttcataaaatttttcatatttcacttaaaaacattaatgagtgatgtggtttttaaggggtggcgataacaccttatagtgttataaaggttaccttatagtgtagcttattctacagactatactttggactacacttttacagactatgtacttttggaacatgtataagcttcatttattaaatccgtatttgttgagcacctgggatgtgctgggcactgctagaaacaagatgtaaagtgctgaaagaaaaaattcagaacctttattcaaatcaacaattttgatatttaaaagaaaactcaatttaagaaataatttatcatttgcccactatgtgcaaaatactgtactaagagtctgtaaaaactagtgaggcagtccctgtcttcaagaagctgtctaggagaacaaagaaggcaaacccccgaatggttatagatgtagaatagatgtgcagtagcagacagttcaaggtagtaggaagaaaatgctctgcaagggggtattcattctgatcagtgtttgggatggacctagaagcatgacaggcacagggaacagtgtaagcaaaggctgtgatgtccactctaatggtagcgtaagatgcgtgaaggagagaagcagatgacaaccttccaagctgggtttagatcatgctgtagagagttttgagaattaggataagtagtttttaaagttatgttcctttattctcttatatatacttcagctaaaggtaaagataattcacatttattgagtacttaccatatgcctgagcttttcgtgcattttctcaatcctagcctatatggtaggtactgttactctccccattttcacatggagaacagaggcttagaggtcaactaatttgtgcagcattcaaaagcctatggtttttaatttttaaccattttatgttatatagcctcccacatcatacattttcatttaatataggagagccctttttatctctccaagtaagcaatagttgtaaatttatcataaggtggactgagttttattgacatacctaattttatttgtattttgtgagttttattgacatacatagggaattttttttatttttatttatttttatttatttttatttttatttttagatggagtttcgctcttgttgcccaggctggagtgcaatggcactatctcgactcactgcaacctctgcctcccgggttcaaacgattctcctgcctcagcctcccacgtagctgggattatataggcatgtgctaccacacccgactaatttttgttttttttggtagagacatggtttcaccatgtcggtcaagttggtctcgaactcttgatctcaggtgatccgcccgcctcggcctcccagagtgctgggatcacaggcatgagccaccatg

SEQ ID NO: 2315 - DNA, 1654 bp, Homo sapiens
ctaaatgtccaatcagtaatggcaaattgtggtgtctctgcatgtgaagaatattagctagcttgtaaaaaaactttgttttagaataagacgggaaatgaaaaaattttgtctatactaattacaagtaggcaaaagacagccactagataggggaactagaagggaacagggaaaagtgaaatcaattaaatctgttgggccatcagctgaatttgttcataagggattttgtttctttagtcccatatgcattgctctctttatgtaatttctttaaaagtgaatttgaaattattttgaacttttcttccaggcatgttactaccagattcagcgtgagaagcttaactaggctgcataacagcttgaaaactggattatctactacagagtgttataacaccatctggagtcttcctgtagtggcaaaaaagaacagtgttgaaattggaaaggactttgtgttatttaggttgttagaatgagccttaccaataataagagccctgagcccagaaaaaaggactgtatagtttaaagggaggattgaaagggaggtaaaaaatcagattagaccagttcttggcctatgataagttccaaaaataccatttatctactatttgaaaaaagaagaggatatcccttcctacagtaaagggtatgtcagctacatgaagttgtaagaaaagcttccagtagagcttcttatattaaagaagttgatggatatttttgaatttctggtttgcctgaatccacctgcagttaccccgatccgtttgcaagaaccagatcgtacttgaaactatagtggccacactctgccttcctgagtcccttccagtcatgtgtgcatcatgtctctttgccaagggaggggagaaaggaacttttaaactgcagttttaactttttctaagctgtttcttgatgggagaggttctgtgcaaaactaccacattctgtccccaaaatgtggaatgcatccaaataggagtcttctgcctcttaacttaaaagaacataggaattttgtttttggtttctttatcatgctacagagagtgaatacactggaattcagacaccgactctgagctgctaggaacctcatttgtccatgtgcaaacgctgtattccaaggcctgtgaatggcagcctgaggaagttttgcatgcaggctgtgttttcgagcaggactaacaactgggaaataagcaaaaaactgcatcgatccccagcctggtgttgttcttccctatacttcacactgaactcaggatgggaagaaaaaggaaacaagctttggctttttccatctcaaaagtattgtggcacctcaacatttcagtgttttgctttttaaaaaatgccctattgtaagttgttggtttatactgtataagtaacactagtagctgttttgaataacataggtgctcttcctcatctcatctcctacaccgtggtgagcatacagagtgtcctgatttgtgttaagtgactgagaagatgttaattacttttgaaaaaggatcatggtttttgctctactttataatcaagacaagtgtttattaaaatactgttttggaatgttggctgtaatgtaacagcaattttcataataaaaggcattcatctttat

SEQ ID NO: 2316 - DNA, 16150 bp, Homo sapiens
cctcgccaggcgccacgaagccccggcgtcccacaggtcccggaggccgctgcgtcgcggggagctgggctcgggccgccggcggttgcgccggggcagccccgcggggagagcaccatgaggactgactcgggggctcggctggaggagggccacctggtgagcggcgaggggcgcgtcggcctcgagaggtggcgggtaaacagctacacttggcagtgggggtgggtgtgtgtgggggggcgccaacgagctgggaatcactaagggagggccttgctcgtggggtgcgcgcatccgcccctccagtgttcacaggaatgggacggagacgcaggcgaggccgggaccgaactcccggagtgggagagagaggcctggcatgaagtttgcggggacctgagcccgcgttgccacgacgacgcctcactcatctgaggcccggggcccggcgggtgccggggcttccagccaggcctctcctagactcctccgaggagaggtctgtagctgcccagaagagatctgttcgcctgcggagtcctttaattaaggtcttccgtcacgccccgcttcccgcaaacaaatcaccgccaccacttaggaaaccacgggaaagctgtgattgcagcgccacggtcgccagatttctgctcctgggcacattacccccaactccgaggccccctttttggcagggctagtctggactggccaatccaggtccctgcacgcctctcaccgcaacatccccgcagggcgctgcgcgcggggtactagccaggcggcgcggcccgatgacgcattgcgcctgcgcgcgcgaccgagccgggaggggtggggcgccaggtgcttgggggccggcggccgccgaggccggctaaacgcagaatggggaagaatcctgtggtaagcgagccttagctacttttaattgttaggatttttgtcttcagttgagccgtcctacttttgaggattagaggttgggtctctgggtgggtggaacgtcatttttgcgggacttttgaaatcagttacgtgaacagagccctgggatcgatcgcgcgcgcttcgtagcatctttagaacaatagcgcgttcctgtgactgtcattcttctccaattgtaattttgactactggatggtattacggcagcttgcctcgtcctaatcttgtagtacttgcattaatctactgttcgaacgaatggattgctaaatgggacaaactacaagagtgtctaaaatttaacccttttgaataaatgtcttatgcaagcagcatgagatacttggaacattaaattggcttctaggcatttctgttactatatgattctaaaatacttctcaactgtaatgctgtctgaactacaaacacttttcttattcatgtaaatgagggtttagaagggttccccccacctttctttctgccctaaaacgcattcttcccagtgtatgcaactggcctttttaaaaattgtgttagtatgtggtttaaaacctccatttgtttcccattgaattaaaacaaaatccaaacttcccttggtctgcaaggccctaactaatctggctcctgcctacctctccttggtaattgtgcggcagccttgctgtccttttacctgaaacattccaagcccaatttaacctaaaaatatttgcatttgttccggttgctgctttctcattcaggtctcagctcaaactcagagaaactttccctaacaaaagtagcactcagtctccttcattcattacgttttgtgtgtgtgtatcttgtgtatatatatatatatgcacacacgatatgtatacaagatatgtcttaaatatagcatataaatatattttatcgtacatgctgcatataatatatagtatatattatcatatatatatttttaacattgtttctaatactcaaccactagaatgtaagtttcataagagcagagttctctccattgtgttcattagtgtattcctaatgcttagaaaagggcctggcctagagatggaaaggaatgtaggaaggaaggaattttatatgaaatttaggatgggagaacaaattttaaattgcccatgtttctcatcagtacctcccaggtttcactgatgaacaagattatcaagagatttgaagatcctagtctgatccattatatttttctgtcatgtctgaacaacagacttttgaaagaattgctttggccgggcgtagtggctcactcctataatcccaccactttcagaggccaaggtgggcggatttcctgaggtcaggagttcaagaccagcctggccaacatggtgaaaccccgtctctactaaaaatacaaaaattagccgggcatggtggtgggtgcctgtaatcccagctacttgggaggctgaggcaggggaattgcttgaacccaggagatggaagctgcagtgagccaagatcgtgccgttgcactccagcctgggccacacagcaatacaccatctcaaaaaaaaaaaaatagcgtgatggtatttgaagtaaagatgctctaggcttttacttacaagcaaatttattttttccgccacagcgtcctccacgagctcttccacctgtgccaaggtaaaaataatttacagtaatttcattattgagctttaaaaatggaaaatgaagacagtggaaaaattgactagtatcattgcaaaattacaatgattcaggaaactcttctgaaaaatttagggattttctgaaattttaaaggtgaaaaatccttgaattttaagaataacagttataatggaatgttatatttaaaagcctgaatatcaacatggtaggataatggatccattccctttctaactgttttggtgtctttttttttttaaatcagaattctggtcttttgtgagaatagtttcctcagagtttaagctgattttaatcagtcacaagtaagagttcttaatctgcttaatccattttattaatagacagtagggaatatgtatatgtaggttcagaaaatattgacattattttattagcagtgttattaaaccacttaattataaacagtaaactagtttgtaaactagctattatgtgaaagctaattttattttaaatttgtaatgatttaagtcaattttcactgtgaatattaacaggtttctaattaattgtttcttttttgtctttgtcctgctgattaaatttgtttggtgttatatgacgtgttagtcaaggtgagttagtttaatgtaaatataatatttggtgttcaaaaattagtttgattccttggtttgtttctcttaaaactgagtctgaatggtgtaatttgtaattctacaatatgtttttgtgaaataatctcccatgactaccatttaaaaattgtcattgatacatagcactagatgacctttccattataaaagcacttcatccctgaatggggtcacccagcacataactgttggctaatttgtagctctataatgaggactgcaccttcctttgtctcatttagtcagggtagacaaggttatactatactaaaacccccaaatctcagtgacttagtgtcacacagggttatttctaattaatacaaagtctgctatggcaaaaatgggggaccattacctttcactacctttttactattgatatagcaatctaggctacttttttttttcttttgttttgagacagagtctcactctgttgcccaggctggagtgcagtggtgtgatctcggctcactgcaatctctgcctcctgggttcaagtcattctcctgcctcagcctcctgagtagttgggattacaggcgtgtgccaccatgcccagctactttttgtattttcagtagagacagggttttgccatgttggccaggctggtgtcgaactcctgagctcaagtgatctgcctgtcttggcctcccaaagtgttgggattacaggtgtgagccactgcgcctggtctgcaatctaggctacttctgtgctgtggtcccaccatcttaacatgaggcttcctcagtcaccacaacaagggaagagaaagctggaagattactcactggctctttcaacgtttggctctgaaatgacacagatcacttctgctcacagcctataggccagaaccagtcatagactacacctatgtgcaaggaggctgggaaatataggggatcagatgaatatttgttgaacccactttctgtgtcatggtttctaacattactgacatgcagtgtgctactggtaccacactgtgggctctctctgatcttctcaatttcttgccttcttcccctaatctataaacgtttgccaggcccagggaagagagggagaattcttccctgtttaaaagttctcttctgactgttctctgcattgaattttaggcacccttttctgttgacgttttttcttgctttatagatgatattccacttagtcgtcctaagaaaaagaagcccagaacaaaaaacacaccaggtaagacgttattctttgttgtgtgggatcacaagttttcccaggacctcaggcgtagtaaacatcacagataagggagaattaaggccccagcagccccgaatctccacttcattgaggatagaattaaggccagtttgaagcagtggaattcctggtggtggtgaggtacagggcagtgggcagcctgaggagtatctggacgcattcatggaatagaaggtggtgccatctaagctcctatttccatgatattcctggactctttaaggtcttttatccccagacaacatacatggttttaagctatgattgattccagacccttgaacaagatactgaatttagaaacacagagttcttaaatctcacttcaatcagaatatctctacattacagcatgagtctgaaggcatggccacatcatcatttaaatagtaaagcttcagtcatgagcagaactcgtttttgtcttagtcatccactgataatcctggaagttgcatccgtaactctaaactcagcacatctagaatccatcgttgcctttaagaataaataatttttttacgtctcatgattttctgttaatggaacctaccattttcccagccctcaggcctgaaacctcaagattatctttacctgatcctttaacttcactctttacttgagacctctcacactcctaaaaggtttctgtggttgctgctccttttttaaaacaaacaaacaacaacaaaaacataaaaggaatcatacatactatctttgtttcttaatacatagagttctatgtattcttaaacagtgacttcattgtattacatgataagaatgtaccataatcactgctctgttatttatttaggttatttccaatttttcactccaacaatgttgcagttctgcataaaatagtgggtggtagggaagaagtacttctgtaggatggattgctagcagtggaattgctaggtgcaggatgtgtgcattattagtatgactgactctgctaaattaccttaaggaagctttagttattatcttgctacctgtagagtctgagagtgtctcattctctaaatccttaacaacattggacaataatcaatctttaaaatttttttgttaatttagtgggggaaaagtagcttattttagtttacatttctctatgtactactgaggttaaacattttcatttgtttattgatacatttctattttttttttttttttttgagacggagtcttgctctgttgcccaggctggagtgcaatggtgtgatcttggctccctgcaacctccacctcctgggttcaagcgattctcctgcctcggcctccttgagtagctgggactacaggcgcatgccactacacccggctaatttttgtatttttagtagagagggagttttgccatgttggtcaggctggtttcgaactcttgacctcatgtgatccgcctgctttggcctcccaaagtgctgggattccaggcatgagccactgcacccagtgcaatttctatttcttttgtgaagaagacaagcaaggaagggaatgcagtcaggtatgtgttaaaattcttttaaaagatttcatgagggaagaagttgaagtgaatgaccaaatgaagagacttataaattacctgctaactccaattatccatgatgactttattattctttaacttattaatgaaggactttactatatagaggctgatgaaaattcttaaggcaagaggcaagtaagagaattctctatggtatcagtttttattatgttttccacctttttcaaagttctaaatgttctgaagcaatttctcctcctcctgtcttttgctcttctttttagccccctcgttttttcttcctcagcctttcttattccttcatttatttcttttcctaacttaaagcccaaagttacaggtgaggaggaaggaaagatttgggggataattagttctgaaagagatggggttattctataggaaacattctagttaccttttcctccatctttttaagattcagtgatctttgctcaagtaatctcatttttttctactctgtttttctatagcaagtgcttctttggaaggccttgctcagactgctggtcgaaggccctctgagggcaatgagccatcaactaaagaactcaaagagcacccagaggctcctgttcaaagaagacagaaaaagacaaggctacctcttggtatgtgaagaaaccaaggttaagttgtgatagcacttgtgattttgatgacatgataaaaacctctctgctttcatttctttccccctatccatatcccacaggtggtttcttgcttttatgtttaaaatatttaccactagaataactccaatggcttaagccaagaatactttacaggtctcttttgatcatatatgtatagattatgagaggagggcaacaaatacaggactaaacagaaagttcagatctcagtgcatagaaaaatctagtaaatgatgaaatggacatttcagattagtggggaaatggtagattctgtactaacaataatatagtgaaacaacagctaacatttgtttagtctttctatgtcccaggcagttcacaaggtaaataaaatactataccattttttggcctatcaaattggcaatgcttttttcaaattataaaatccaatattgatgggaaatgggtgcactcatgctttgctcataggagcatagatacagcctgtctggatttctgggaatagtagtaaattcaatagctgcagtaattaaaggatgttaactgcagcgttatttataagagtagaaattggtaatgacccagatatttaacggtgtgatactggctaaataaatcatacttcatccataaataggaaccaggtacccattaaaaggattgttagggtgacacagataatcatcagttgtgtattattaaatcaaagaacaaaggttataaaatagtatgtattggaggatcccatttttgtaaaatatactatgttaatttcttagggttgccataacaaattaccacaaactgtgtgacttcaaacaacagtttattttttcatagttcttaggtgagaagtccaaaatcaagttgtctgcaggactatgctccctctgaagtctctagaaaagaatccttccttgtttcttcgagcctctttttttttttttttaagatggagtttcactcttatagcccaggctggagtgcaatggtgcgatctcagctcactggaacttctgcctcccgggtacaagcgattctcctgcctcggcctcctgagtagctgggattacaggcatttgccatgatgctcggctaattttgtattttttagtagagacagggttttgccatgttggccaggcttgtcttgaactcctgacctcaggtgatccgcccacctcggcctcccaaagtgctgggattacaggtgtgagccaccgcgcctggccatttcttctagcttcttatggttgttgacagtccttggcattgtttgacttgtggtggcataatgccaatctctgcttccatcttcacatttttccttgtgtgtctgtgtccacatttccctcttataaggatatcagttgttggatttagggcccattccaatctagcatgacctcatcttaacttgatttcatctgcaaagactcttgtttccaaataaggttacactcacaggtattatgagttaggacttgaacatatctctttttggagcacagttcaacccagaacgtaaatatgtacatacatctacatagtaaaaagaatggaagaatatagcagtgttacagtggtagaagttttagaaggaggaagtatgatttttaaaattttcttccttcatttattttactaattttttatattttgagcattatgacttttataataattagaaaaatgacaaagagttgtattggagcaaaactcagggaaggaacaaagatggggagattagtgctctcctattaacatcagcccttattaataatttattataattttcctaattacttgtccttctagaaaacggcgtgtcttgattggatggaagaattataggagtagaagggcaggaactagaaaagtcaggagaatggagcataattttggaaggcaagttgaagtgggatgccacagtgcctgggggcactgagggtctatgagaacgaaggggcggatgatggcagaagaaggaaaagagacagaaatggtgctcagactagctttaactactctacagtttatttcattagtggcagtaaatgtagtttcattaaaagtgcccttttagtaatttagttaagatacaagtttaaaaatcaagatggataccaatacctagttttataatttgtgaaaagtgtgtttacagaaatgacttttttagaaaattcaggacccaactaagttttgaatcaaaaaggacctgtcattgccattccaaagtacaccaagcctggcaggttcacctttctaagtttctggatttaaaaattgtgtttttatttattttgttcaggatgaccaatggtaggctctactgcttgcattatatttccagtcgaggctgtaagtattttattacaatagaattgtaaggtcttgaaggtattccagggagctagtatttccaggtaggaagagtagctagtggattagaagaaggcttcactgactcatttaaacttaatacctaccctgtgtgcagaaaagagttaatatagcagacctgagactgctatccttggaaaagcctgctgataagattggccgttagctggcatctgggaacttggatgataaacagctccctacactgatagaaaactttccctaaattataaggtgactcacggtgcatttgtgcacacatagtgatttttgctgaacatctgtttcccttccgggcatccagaattttggtatgtgctaggcttatgtgactagcccctaaccttgggcactgtctctgatgagcttcttttgtacaacatgtgtcacatgtgttgtcacaactcattactctccagtaatgttagtacatcctatttgactccactgatagaggactcttggaagcttgtacttggtttcctctggacttggtccatgtactttttccttttgctgattttgctttatatccatttgctgtagtaaaccataattgtgagtgtgatgatttccaagtcctgtgagcccttctagaaagtcagcgaaccaggagataatcttgggaatcttcagcacagcctgggtattgggttacttaatttttttccatattgtttggcattacaatttcaatttttacattgagagtttagaagtataacatttttaaaaaattaaaaatttgtaagatagtgaaaacatttttgcccaattaaaattcttgaagttcttttctcttatacaagtcttgtacattacttttctttttatgttttagttatttgaaaagttaaatttattttgttttcagaattggagacttcctccacccaaaagaagtcatctagttcatctttattacgaaatgaaaatggtattgatgcggagccagctgaggaggcagttattcaaaaacctcggaggaagacaaagtaggaatttatttattcttctaactattctccaggattaccctgatgctttgtttggagctccgaagcagtagcttctcattaagtcttattacatacttgtatttgtgtacctctaggataagtattattacaaaaaatcagttaaaccaatcgaatgataaatttcagaagagtaaaccactgagaaaataaaaaaaattaagattgtacttaaataaaaaaacttaagagccatctctaaaaaagaagaacacaaatagaatatataagtagcaaaattaaacattaaggatatttaaaaattaaagataatgaaataggctattgtgatttattttcttatgttaacagaattcaaattatgattattttaggaataagtaaaactgggttttagcattaagataaaatgagtagtgtactttaaagaaataacactggaagtcatatatatagcactattatttgtatttgaaaatgaacctacaaatagtgatcaatgtctgtgttagtccgttctcacactactaataaagacatacccgagactggataatttataaaggaaagaggtttaattgactcacagttcagcatgacttgggggtgcctcaggaaacttactatcatggtggaaggtgaagcaaacacacccttcttcacagggcagcaggaaggagaagaattagagctgagtgaagggggaagccccttacaaaacgatcagatctcctgagaactcactatcaccagaacagtcccttgacaggtggggattattacaattcaagatgagattttgggtggggacatagccaaaccttatcagtatctatacagaatcatacagttttaaatttggaaagaagcttacagatctagttcagtcacttcaattttcaaatgagaaaactgaagccctcagaaatgtaagtaacttgctgcacataatagttaataaccgatttatttgagtaaaaaccacatttcttaactccaagtccagggccctttccattatatttatagctagttccttatgtaagtctgtaaaaaattcaataatcatctatttttcatacatacgtccttattacaggaaaacccagccagcagaattacagtatgccaatgagctaggagtagaagatgaagacataatcactgatgagcaaactactgtggaacagcagtctgtattcactgcacccactggcattagccagcctgtaggcaaagtatttgtggaaaaaagccgtaagtagatgccttgttttagaatatgaactctttaaaaattgtccaaggatatcctttatacttctggaaatctgaattaaggaattaagcaaaactgtgtacaacaatttatacacaaaactggtcatcatgctatgattcatgagagtgaaaaactggaaacaacctaaatgtgaaataggagaggaataatgtcagtaagttgtggtgtatctatataataatgttcttcaccattaaacataatgtttagggagaatttttcattttatggaaagattctgataaaaaatgagcatatacacatgtgcacacacacacacacagtttgatctatgcataggacaaaagacttgaaggaaataggctcaaatattaatgctggttgtttctggatttatggggttatgggcaatgtaaagatcttccccacccctgcctgattctttattctttcttgtactttaccagtttgctgcaattggtagtagttgtggtgggacagataataatataaattctacaattgacaataagagaaaatacatgatgatactaccatattaaataagaaatacaacattatagctgtatattcttttgcaagatagttgtgacattgtataatgtatactaggtttgcagtgtattttagctcaggctgctataacaaaataccaccgactaagtggcttaaaccacggacatttatttctcatagttcctaaagctaggaagtgcaagacaaggttccagcagattaggttactggagaaggccccttcctggcttgccgacagctgccactgtgtcgtcatgtggcagagagagctctggtgtgtcttcttcttcttaaaaggattataatctcatcatgggagctttatcctcatgacttcatcgaaatctaattacctcccagtgacctcgcactcactggggggttagggcttcaacatatgaatttttgggggacgcattccgtctataacacagtgtttaagaaaaacctactcaaagcatgatcatgactatatactaccatggatatgttaagcatatgctgcctaaagaactcatctgaaacataaaggttagtccttaaaatttacaatttagattttgtgtaccttgttttagaaccctacttcagaagatcccatttaagggatcttgcagttcttggccaataagaaacctgtggtctagagaggctgacttacccagtgtctcacagtttggttagggtggaactgggacttgaactgtggttttatgacttctagtcacatggttttattcatctaccacgtggtcatttaaattaccgcagttctttttcaagcagtatcacttaatcctcatttttattcttgcttcacttagcatagaaatttccctgctagagtaactggccataaaaggtaccagtggttctattgtctgcccagaagttgtcttttcttagggaaaattgtcacacccctgtctttcatcctccaaaacacctgcgaactgggtttggtgaggataattgaaatggaacctttcctgtttcctgaggtctatttgtggattactagatatacaagaaggagcctctgaatcaacagtaaaaaggctaaagccctgctcatacaatattgcagtgctgacttttgaactgatgttcttcacaggaatgttctaaagagaaatttatgaagcagcctatttctttcctgtcatcccagaaagccatgctacacatcctgacatcttttcctaagaaatttaaagtagttttcaaatattgacttaccttgatagtataggcatataaactttaatacttctaaagtctctaaattagaattttgtagactaggtcatgttaaagatttctagactttattctgagttgaaagttcatttttttttattaaatataattgatttctgaaattgttacttcactttggattgagaagaaaatacactgacatcgcttatttttcttcaagatgaaaaattatgtttaaggaaccccaagaaaagatccttctgaaataggtactgagtcaaggagaattttcagatagaacagcaatatttcagtcttagtttgcggcttcctgagtatggaatttaaaaaaaaaaatggctaccagggttctctctcgctagttgttagtaattacgttatgtgttcttagggagattccaggctgctgatcgttcagagttgataaagaccacagaaaacatagatgtgtcaatggacgtgaagccttcctggaccaccagagatgtggcacttacagtgcaccgggctttcaggtggctgcttttgttggacttttcttaaaataaatgttaactgagttctgtaattaaagaaaaaaataacctcttggttgttcagtattattaatgaaatcacaacttaaaatggtaggtaggtatattttttaaacatcctattggaattgagtgatctacctatcagtgtaactaaaaagaaagagcttgcttttacttgtcatgaaatgttgaattttattcttgtatatgaagagattttaaacatgttttagctttttactttagtaattcatgtataataatcaaacccttttccattcaggatgattggtctcttttctcatggattcttggctggctgtgctgtgtggaatattgttgtgatatatgttctagcaggagatcagctatccaacctctcaaaccttctgcaacaatacaagaccctagcgtatccattccagagtcttctgtacttgcttttggctctgagtacaatttcagcttttgacaggtaatgcctatgactccagatctgtctaacttcttcaggaggaaatgctgagcaaaatgtgtcactgaccatgatagttttcaaaatagaattatagagtatcaatgttacttcaaaaagttttaaggccagtctacttctgttcttttttgaggggatgagaccattgtaaacaaaatattcccaaaagacttcacccattccagcatcaattcataagtccaaaatttcatccaaatatagtcaactcagaagttcctaaatgtcatctaaatcaggtataggtgaaactcagagcatttgtatttgtctcctagcactgctgtaacaaagtaccacacactggctggctgaaaacagcacatttattctcttatgggtctggaggcgagcagtctgcaatcaggatgtggccagggttgattcctttttccagggctctgagggagagtctgtttcatgaccttcccctcacttcagtggttgctgacagtccttggcattccttggctgtagatgcatcattccaatatttgcctctatcgtcatgcagcactttccccctgtgtatctctgtatctgtgtctattctaataaggacagcagtcatactggattagggttcatcctaatgaccttatcttatctttattacatctgcaaagaccctgcttccaaataaggtcacattcataagtactccaggttaggagttcaacatatctttttgggaacacaatttagccccttttaaaaaaaatccaccgagttagagcccaatgatatgggtaatagaaagaggtagaaactaatgaaattttatagatcaagtttaattttctttaggatgttttaaccccaaaggaatgttgtccaaagtagtctagttagatgttttatgtggcctttgtaaattagataattttgtcatgcgtgttaagtatacactgtagctacttaaaacctagtaatagtatatgtgctagcattagactagagaaggaaaaaactatagtcaagaaagtaaagttttgttaagtttacaactgcgctgtgacaagaaacttttatattttctaggattgactttgctaaaatatcagtagcaatccgaaattttttggccctggatcctacagctttagcatctttctgtgagtaagcagtttaacatgataactgtgtaatacttcagttataccataattttgaaccaggataaatataattttttttaaaagttgtattactgctccttataaacattacctatagatgttcagtgaatttgtaattagaaacataaaaggcataatattgatagaattattttttcaattgaggttcatctaaataactttgaaaagcttaatttattgtactatattacttactttttaacttttgtattttctacttgacattaaacagattcagcgggtatggccttttaataacaaacaatattttatatctttctgatcatttggaatgcattttgttctaagttttgagaatattaataaaactagttttaggaccttgagcaagtcatttaacttttaaaaagatgttctaggttcttgtcagttctaatgatgaaatagtgaacgtctcaaaagatccttctgcacctattgttctcaaaaatttatataaggatgtctggcctattgaaatatatttatttggtcaaataaatttcttttatatcatcagtcatgaaagtatagattattttcgatattaatctataaattcaaaataaaccaggttgttaaaaattattagtaatttcatttgtctttttctcagtgtactttactgctcttatactatctctgagtcagcaaatgacaagt

SEQ ID NO: 2317 - DNA, 4357 bp, Homo sapiens
ggattgttgaatttctggaaaaggtacaacaaagtgaaactggagcaactgagcctccaacatagacgagcccagctgctagatatcaatgggaagctgcgggagatgctgaagcagtacttggatggcatctcagtgagtgacgaagtgctgagccagctcaacccactctttatagtcaactatcaaagcaacttactccagcccttgtccatacgtatagcccatccaggtgataaacaacatccaaccacttaaaatataattgaagcagcccagatgatcttccacaacctgtgatctaaggaaaaaaatctttcaactcctagagatttttttttttttttgagaaatgtagggatgttgctattaaaaatttccatggagtttatgagctctttatatcttttccatattggacagagcagttctctttgaggacactaggaacactgtggtcccagggaacagagagaacagctaggcaactaccaggaggctcactgctcaattaagcatccctcctcagaatcagggcaccatgagagccaaaacccataccttaaggacctagagatcctatgggaagactcaagaccaggtccttaaagtcagttaggacagcaagaggaggccaggggaagaggtgatccagggcctacaaccacccccatgccaggcaagatgcaattcacaatgcttttttcctcagccctttacctcattcccactttcaaaggcagtctcagaaaatatcagatgaagaatgcaaataagttttttaaaatttattatttattatttctttttgctcttgtttcgtttctcttccttgagcttctttttggagactttgggtctattggcctttctgtataggtgatacccaatgaggcccaggagggctggcaccatggccatccctaccagaggcaaaatgcccttcaccagctttagccagtagttggctcggattagtgcaatcagctccacgtcatactgcaccactgcatccgctggagaggcagaggggtggagagggttagactctctgcattttatccagggctcagaatctgaatgaaaatagggagcgtaggccacagcaaagccaacaactatgaagctgacaagatttaaatgtgggcttgaattcctttagacaagagtagaggaggatttacgagcagagtccagtgataatcatgttgaccccaactacacatgtggcttgggtccagtgacaagtctttgaatgcaggaaaactttctgtgaatatgaaatgtacaggctcttctccatttgtaagtgggagaaccctctatactaactactaatttatcgtatttccaaataaccacacggatagagtctttgcagggctgaaattaaatggatttaaactagactttaaaaaatcaaccaaccaatgagcacattcaacgtgattatgagataacaggagtttcaacataagagctgaagaggaagaaggatgaggatgctgcttaagaagtaaaggggcaggtggaacagaaatgagtgggcagaagaggtacaaataagcagcactgggaatggggaggtaatagggctttgggtaaaagtttctccttggtccccctaccctccttccaggccttcctctaagctggaactaggataagaattaacgagcccagccaggcgcggtggctcatgcctgtaatccccgcactttgggaagccaaggcaggcggatcacctgaggttgggagtttgagaccagcctggccaacatggagaagccccatctctactaaaagtataaaattagccggtcgtggtggcgcatgcctgtaatcccagctactcgggaggctgagacaggagaattgcttgaacccgggtggcggaggttgtggtgagtgaagattgcactattgcactccagcctgggcaacaagagtgaaactccatctcaaaaaaaaaaaaagaattacgagcccaatactctgtggagtacaacacattttagctaatagaacatttgttagaactgaaagcaaaagatatgcatcttgggaaatctgtccatctcaacccttcaaaaatagacatcggcagtgaccaatgatggcttttaaagttatggggcagacttggctttaacagttgctttttgttttgttttgaatcacttgactgtgattatttttactgtctcttccctgatggaggctgaaaggaaggggtggggggtggctgtacagctgacacagcgtagagttgtagaaaagggcaggaaagaagtccagtgttctgggaaaggtggtggcacaggcagcagacccatgtggcccaagcaggtctcttccctaacaagttactggctgctggaggtcatgccaggtggcctcatcaggttgtctttagtccctgttggtgatatgaggaggaaaaaggtggccctgtagatggaggccccagccactcctatctgtctaaacaaacttggtctggatcttctcaagcatcaaacaaagtatatagctccttatagctcttagggactgggtattttgatggcctgagagagagtcctagtcagattacctgggacagatggtggaaatccccgttttccataggccaagtgagaaggaatgattgcccttcgcttctctctgagggaaggaatgtcagtcacagccagaggcaggagaggtaggccagcagcctcagtccagctgaagctccttcagcaaaaccccctgaatcttcacacccaaaacacgaatttttccacctgaacaccaaacaggctggccagcaaaggtgtccatctccccatgtgcctcaactcccccgacaaaagcaacagcgcaagaggcacagaggctttgaatgccctcagaggtcccactgacctggacctgtccagtgggaagcagggtcctttattccacattctcctgcttaaggagtgaggatggccgagaaagcctctacccatgcaaagggggtacccaggcccacccctgccgagatactcaccccacacacatgtcgagaagactctgctccagaccttgaagaagaagacacaactgaactggaagctatccaccttccccaaatcccatgacatgaagatcaaagtcttcctcctccatcctcaattgacctttccctcacttcttaaatctctggcttccaataggatatgggacaagtggagtactagaagtgaggtttgaacctcaggaggtaactcgtagagccctagggtcttactcatttcaggggggatttccagggcagctttggagccgaagaggctaagaaagggcttaggttgggaagaggtggaatgggaggcacaggtcacatacctggaatcacctgcttttggccaagttctataaccagagggtctctggtcagggaggtgtcaataatacgtccatctaccaagcttccctggggggagagagcatcaagagcatacatctagcaccctctccctcccagcaggcgcgcaacacacacctggaccgctgggcggcggcagcccccttagtgcggcagcctagcgttccccttaccgctgtaaggaacaggaagccccagaaggctggcgcttctcggagatctctccaccctgcacttctccgtgccaggtaggaactggcagaaaagcaaggagggaaaagaggcacggaagagcaacgtctctcccctcgccacgtgctcgacgaccccagagccccgagtttcttctcccgaaccgcttgccacgtgtccaagccaaagctgacgtgtttcagcagggcgccgccccctcccaggccccgccccggccccccagacccctcaccgtgtagtgtatgtgaagcgtgtctccaaaagcagcgggctcggcacatggttctgggggctccacctacgatcggactacaggggtcacggatgctcttccaaagatcccgttctcgcccctagacccggcaccacccccaactcagttcccgcacttcctctcctcccggctcccaggttcgctgagaccccagtattaccacccaacaaggctcggcccacgggggctgagggtcgggactatctcctcaccagggtctccacttggagggtccggacgggactttcggtttcgagcccagcctcagcccggcacaccgccgcactgagcagcagcagcagcagcagatggagcgggaggagtgaggggcgcagggtcatgactgggcgcggggcagggagccggggcaccaggacaggctgttcgggtggcggcagccaggacagcgttcccgcggcgcccaggccagactggacgggacggggcgggtcgcg

SEQ ID NO: 2318 - DNA, 696 bp, Homo sapiens
ctcaaaaccaccctgaaaggtcggcatgattgtttccattttacagataaggcacagggtgctcaggatgtgcccaaggtcatcaggctaggtggtgacagagacaggattcaaacccaggactgcctgagtccaacgtggttgctgtctgttcttccaagtcgtctccttgtggctatcctggcagtgtctggctggcagaccccacccaggcagttctcattcctctccgacctccagctacttcagcttgaatttctggaggttatagatccaagtatccgaaataaggcagggggctgtcctatccctgtcctttgaaaagctagctgaaaagagcaaggagctgttatcctgtaagaacagggtaaatccctgatcttttcctctggtgctactatttcctttctcctttcatcaacaaacttctcaaagggcagcacacgtaatccatttatgtaaagacttcacttttttttttttttttttttttgagatggagtctcgctctgtggcccaggctggagtgcagtggtgccatctccactcactgcaacctccgcctcccaggttcaagcgattctcctgcctcagcctcccaagtagctgggattacacccgccaccacgcccggctaatttttgtatttttagtagataaggggtttcaccatgttggccaggctggtctcaaact

SEQ ID NO: 2319 - DNA, 648 bp, Homo sapiens; identical to SEQ ID NO: 1950

SEQ ID NO: 2320 - DNA, 648 bp, Homo sapiens; identical to SEQ ID NO: 1951

SEQ ID NO: 2321 - DNA, 390 bp, Homo sapiens; identical to SEQ ID NO: 1946

SEQ ID NO: 2322 - DNA, 390 bp, Homo sapiens; identical to SEQ ID NO: 1946

SEQ ID NO: 2323 - DNA, 732 bp, Homo sapiens
ctccttcccacgctgtggcgaagatctgaactatgcccgtcgcctggcacgcgatgcgggatgggatgcgaaaattgttgccaaggttgaacgtgcggaagccgtttgcagccaggatgcaatggatgacatcatcctcgcctctgacgtggtaatggttgcacgtggcgacctcggtgtggaaattggcgacccggaactggtcggcattcagaaagcgttgatccgtcgtgcgcgtcagctaaaccgagcggtaatcacggcgacccagatgatggagtcaatgattactaacccgatgccgacgcgtgcagaagtcatggacgtagcaaacgccgttctggatggtactgacgctgtgatgctgtctgcagaaactgccgctgggcagtatccgtcagaaaccgttgcagccatggcgcgcgtttgcctgggtgcggaaaaaatcccgagcatcaacgtttctaaacaccgtctggacgttcagttcgacaatgtggaagaagctattgccatgtcagcaatgtacgcagctaaccacttgaaaggcgttacggcgatcatcaccatgaccgaatcgggtcgtaccgcgctgatgacctcccgtatcagctctggtctgccaattttcgccatgtcgcgccatgaacgtacgctgaacctgactgctctctatcgtggcgttacgccggtgcactttgatagcgctaatgacggcgtagcagctgccag

SEQ ID NO: 2324 - DNA, 472 bp, Homo sapiens
tggagatggttgtgcagggagagcaggaagggagggagtcagggtggacactagagggagggtagagagaggagctcctaaggcagactgccaaggaagttagagaagcaggaaagacagatccatcacggaggacaagggaggagagaatatatggaagataaggagtgattcttgccagggacctcccaggccccaggaagggagcactgcagggtttgcctttgattgggcacctgggacgccctgagtgaccttcacagcagccctttatgtaaagtagtggggtacaagccaggctgcaatcagttcaaaagagatttacctttaatcttggtcaaaatcctctattttgaaaacccagccagtggaagtccttattcaattagttatgttctgaactttttaagtcattgaattctgagatacaccttattatatttagtattaactatccaaagcttgttcttaa

SEQ ID NO: 2325 - DNA, 1462 bp, Homo sapiens
ctcaattattcagaatgctgggctgtccctacaaagcatcatatggggtctcttaacactctggttagtttcctttgtctaaaccctctttcttaaaaagtcttctttatttttagtccatttcttccttgcagcttaagattgcatacattttattcctataagaaatgtgaatgcacaaaactttattttcatcagaaataccaccctgttgaaactgtttcttacagcacgaaaggtaatacaggtagatgaaatgatagtggaagaggaagaagaagaagaaaatgaacgtaagaatcttcaaactgcaagagtaagtggacactgaggttggaggctgggggttatcacaagacaagcaaatacaaatgcataaaatacactgttgtacaccagagctcacagtttagtagagatgatcctactttacatggcaatgacaaaagtgataattgactggtgtgcaaagtgtgtagaacacagaagaggaagctagcaagcctcccctaccccactaggacatagacaggcctttcaaggtgagtgagagtctactagctagagaagaaagggaagaggaacagtattcaggatagatgggggaggcggaaaactgaagatgaggaaaccagttagaagcctatgaattcttgaactgacatgctgacactatagaatgaagggatggtttttagataggttttagaaagaagtggcatggttggtggagaaaaggaggaatcagagacaactgcatggtttctagctaaggcaaatgctatccagtgaggtgtgggacccaggtggcagagggtgctggactgggggtggtggagcacatgccaattgcatgacatgttgaccattcattacttttccaggacatctaggctagacagaaatttcagcctggagctcagggagaagagggagatttgagagatacactgcctcccagatctttaggtgtttgtcccagtgtgggagtggagatggttgtgcagggagagcaggaagggagggagtcagggtggacactagagggagggtagagagaggagctcctaaggcagactgccaaggaagttagagaagcaggaaagacagatccatcacggaggacaagggaggagagaatatatggaagataaggagtgattcttgccagggacctcccaggccccaggaagggagcactgcagggtttgcctttgattgggcacctgggacgccctgagtgaccttcacagcagccctttatgtaaagtagtggggtacaagccaggctgcaatcagttcaaaagagatttacctttaatcttggtcaaaatcctctattttgaaaacccagccagtggaagtccttattcaattagttatgttttgaactttttaagtcattgaattttgagataccccttattatatttagtattaactatccaaagcttgtttttaa

SEQ ID NO: 2326 - DNA, 17239 bp, Homo sapiens
gtgactgtggagtttgaattgggtggcggttgactgtagagccgctctctctcactggcacagcgaggttttgctcagcccttgtctcgggaccgcaggtacgtgcctggcgacttcttcgggtggtccccgtccgccctcctcgtccctacccagtttcttgcttccctgccccatctccgccgctccccgcagcctccgccgagcgccatggctcctaggaagggcagtagtcgggtggccaagaccaactccttacggaggcggaagctcgcctcctttctgaaagacttcgaccgtgaaggtaaggggccaggccgtcgcggcctcctggggcggtcgcgggatgctggcgggtggggacacgagctgcacagattcgcccgcccgtgacccgtgtcctgtcggctctgccctcccgcagtggaaatacgaatcaagcaaattgagtcagacaggcagaacctcctcaaggaggtggataacctctacaacatcgagatcctgcggctccccaaggctctgcgcgagatgaactggcttgactacttcggtaagagctggagagcttccctgggcggaggccaggagccccttggggttaggtgacacccttcagaaagggctcgctcagatgtcaccttttaatgagatctgacatgaccacttatggaaaattgcagaccctttcactctctgtctcacttccctacttcatttttctctatgaaaaatgggggggtggttggggggcggcgggcggggcggtctctgtcggacaactcagctctgctgtttacaggtccaaaacagctgtagtgaatgggcatggatgggctgtattccaataaaattttagttatggatacactgaaatgtgaatttcacataattttcacacatcaggaaatttatttaattttttttaaacagagtctcactctgtcacccaggctggagtgcagtgcagtgcagtggtgcgatccctgctcactgcaacctccaccttctgggttcaagtgattctcctgcctcagcctctggagtggctgggattacggtcgcctgccaccatgccccgctgatttttgtattttcagtagagacggggtttcaccatgttggccaggctggtctcgaactcctgacctcaagtgatccacctacataggcctcccaaagtgctgggattacaggagtcagccactgcgcccggccagaaaatagtatttttaaaaatatatgtatattttacccatttaaaaatgaatgaataaatgacatggttagttaaccagagctcagatagaagaataacccgaagcagctccttctgcagcttatggaaattgctaacctaaaaatgggcgcatcaggctgggcgtggtggctcacgcctgtaatcccagcactttgggaggctgaggcgggcagatgacctgaggtcaggagttcgagaccagcctgaccaacatggagaaaccctgtctctactaaaaatacaaaaaagttagccgggcgtggtggcgcatacctctaatcccagctactctggaggctgaggcaggacaatcgcttgaacctgggaggcagaggttgcggtgagctgagagcacgccattgcactccagcctgggcaacaagagtgaaactccgtctcaaaaaaaaagacacatcagttttcctggccagagaaaaatcccagcctgtttctgcactcccttattaaatgtccggagaaatgcaggaggctgtacttttctgctgggttgcccttttctgttttccttattattaactatccagcatgtagtctccttcctggatagaaatgcatggtctgctcacatattagacattgaatgatccttttgacttgcccttttatttattaagccattcatttgcttatttctccaaatactgagcatgtgtcagtcacagtgctaggtgctaaagatgcactagggaataaaacagacattgtctctgccttcaggaacatacagattagtagaaaagagctattagaaaaatccacatacaattatgtaattaaaagtataggtactacaaaggagatagaatagagtagtggtcagtgagcatattgtgctttctatgccagatgggcattgtaccaagtgttttacatacattaactaatttttcttcataactaataatatccctatttttcaaaatgacaagattaaggcacagagaaattggacactttgctcaaggcctcataagctagttagtgggatagtctgtttgaacccaggtattctggtttcatagcctgagatcttaactgttttacaagatactatgagagtttctagcaggaggttctaacctaactttttattctacatgtaaatctcacaaagaccttttcattcaacacgtttactgtacatctattgactgctagatttttgccagaagcaaaggatgtcatctctggaattcagtccaaggcagggatggacatttaaacagctttgagtagttattgggtataatgagggtgagcaactaactctacactttgcagcaaactgctgagatagaaaaataagcaggctgggcacagtggctcacctggaattccagcactttgggaggccaaggcaggtggattacttgagcccaggaatttgagaccagcctgggcaacataacaagaccatatctttaagctttaaaaaaaataattaaaaataaatttttaaaaaagaaaaataagcagagggcagggcatagggtggggattcatgcctataatcctagcactttgggaggccaaggcaggagtatcacttgaccccaggagttcaaaaccagcctgggcaacatagcaggagaccacatctctacttaaaaaaaaaaaaaaaaaaaaaaaagacaacctggacaacttggcgaaaccctatctctacaaaaaaacacaaaaattagccgaatgtggtggcgcatgcctgtagtcccagctacttgggaggccaaggtgggaggatcagttgagcccaggagacagccaaggaggcgccactccactccagcttgggtgacagagcaagactctgtctcaaaaataaataaaatttaaaatatattttttaaaaagaaaaataagcagaatttttggggtgatgtttgagctgagttttgaaggatgagttagaaatttgttaagtacggaggtgaatttcaggcagaggaaatacaaagtaccatggcaacaagtcatgagagtcagtggcacatttgggatataacttggagaaagaatagattagatggtgaaggtccttgaaggttagaccaagggctggaccagttttagaaagataaatggtactattaggcaagatgatttattgttaaaatgtaatagtaactacaacgttctttttaaagcccttggaggaaacaaacaggccctggaagaggcggcaacagtaagtgacctttcctattttccagccagtggttacttaagtctagtccagtccccagatccaactaatagatgcttactgtggaagaggtttcataaagggacatcatctgtttgtgtcaactgaaaaattagagttggaccagacactgtatacatgagacccagatagttctgagccctacagaaggtggcagttctgtttttgaccaatttcttgcagtcctttgttctgaactctacagcggaagtagaaagcctcaagcccaagttcctttaagcgcctgagtcattacactatgcattggcctgctagatgataaaggtgtttcatcatgtcgtactgtagaagcagtgcttttgcttgggatgctcagtattccccaacccctctcatctccttcctcccagcatcagtgccaggattgaaggcagtaagatggggatgcaaaatagagcatttaaagctgcactgtccagtgtagtagccactgggcatatgtagctatttcagttaattacaattaataaaattaaagaattcatttcctcagacatactagccacattttacatgttcaatacctacatatgactagtagctactccatcagagagcacagaaatagaacattgctactcttgcagaaagttttatgagacagcattgggaactagtccatacatgggcttcacagagtccctaggcactctaaaataatatacaaacaatgcgtgtgtatgcacgcatttgtgtatctttctgttagtttattgtagccttgatcagatttacaaagtaaaccccaaaattacatcttttgttgagttgatcagaatcatttggaatatcagggtttgaaggagtctgaccaccaagggcacatagcagatctccgccagcttcattcagaaggtaaaggtaatgaggagccaattatcaatttggaaaaaattggagcatttgggagagaggtggggattattcacccccctacatacactgagctccaatgttttaaaagagttacctctgagatgaattatgcttactagctaatgcagttctctctttttaaattagaaatacagaactgcaaatgagaacttctaatgtaatatgagagagccattgttaccacaccaagttgagagaattctagccttgactaatatgatttaaaactccagaaaggaacgatagaaaatctataaaagctcttagttgggaagtgtgttggggctcccaagaccacctccaggtttggtgattcactaggaggattcatggggctcagcatacagtcacacccatggcgatgatttattacagtgaaagtatacaaagcattaatcaacaaaggagaaaattgcataggacaaagtccagaggaaaccaggcttctaggagtccactccctgtagagtcaaacagaacatgcttaattcaacacatatgaaatgctgtctaccagaaaatctgattagagagtcaatgcccagagttttaactgggggctgctcacataggcatcctctgcctagcacatgtcaaaatcctagactttcaggagggaagtaggtgttcagcatgagccatattgtttgcataaagtttaggcacagtgaggcatcttgttaaggaaaggtgggaatctttctgaaatcaagttcccagatgccaaccgaggccaggcttgcaacaggccctttctatgtgtatcagtctcaggcctgctctgttaactgtcctgcacagtagatgcccagtggcctgccaccactgatgactccataaaatgccagttgtttctagagatggcagaaggttggcaggaatgcccctactttctgttgcatcaagcctggcaaacatcagtaacttattacagccctatttcttgctaagcctaagacagcctcagaatccttctctgagtatgtcaagcagtccctaccagaaatgaaacctgtgccattccaaacctgtagtaattattctgatgtttacatgtgttctataaggaaaggactgtgaatcatgactgctctttgtagtgcccatacttattaccatatgaaaaaaaaacgaatttgaatggtgactggaagcctttttgaaggacccaggatcatcatagaaaaccttattgagaccctgtagatttatcgaaaaaatggtaagcttgacacaccaccaagtgttgtagaggatgtagatcattaggaacttgtattgtttgcagatgggctgtagtcaagggtaaccactttgggaaacaatttggcataatgcgaaggctgaatatttatgtaacctataatccctgtcatgtcctatccaaaggatagagccaaggggaaacttggacatgtacctcagacacatgtaagacagttcaaggtagcagtgtttataatagcaggaaactattgatggaagatggacaaatccattgtggtatattcacacagtgggatatgatatagcaatgaaaacaaattaactacaaccacaaagagtggtgaaaacagccaaaaccaaacaaaatgcttaagtacacacttgtgaaaaagcacatctgtgtgtgcacacatgtatacacacatatgcatgtatctgtgagcacatacacatgtacctttcgataaagcaagtgcaatgatatggttacccctggggaatgaaggattaggagactcatcacctttggaagaagagataagaaaatggaacaaggaatgaatacagagccagaagcaagttattggcaatgttttaggtcttgggctgtgtggtgggtttatgggagtttgctatattgtatattgtatcactaacatttaacagtcttatgtattaaataatagttttaaaaaagtttttatcttgaaatattgttcctcatattttggtggaataagcctggtgctttctggctatgtttgtcataggctgacctggatatcaccgaaataaacaaactaacagcagaagctattcagacacccctgaaatctgccaaaagtgagtacctttcaaaactccttgttgtacagaaagaactgaggctcaggttgcttggttggctgctcaggcagcgccttgttggtagagcctcttccctttaatgtctggttcttaatcttgtaaatccaaaaacttgcttttggatggtgcatttagttaattttttttcccccgaacagcaattcaaaccagaaatttagttaattttaggcaggactgctaaaaaccaaactcaagacccgtgtgcgagctaaaatgaaagtgaaaaaaggggggaaaaaagctgtgctagaaaccaaacattgttgcctgcttactttctcctgggttaaatagatgacaagatttagagaggtgttaaaagactggtaacaccaactgagacgctccctgatgtaatcaacaaagttgaaagcgaattgaaaaaggaatgactttctctgcatataattcaaaattactcaattcaggccaggtgcggtagctcacgcctgtaatcccagcactttgggaggccaagctgtgaggattacttgagcccaggagttcaagaccagcctgggcaatgtagtgagaccttgtctctgaaaaaaaaaagaaagaaagaaaggaaaggaaaggaaaggaaaggaaaggaaaggaaaaaaaaagttactcagctaggcgtggtggctcacgcctgtaatccaagcactttgggaggccgaggtgggtggatcacgaggtcaggagttcgagaccatcctggctaatacggtgaacccccgtctctactaaaaaatacaaaaaattagccgggcgtggtggcgggcgcctgtagtcccagctacttgggaggctgagacaggagaatggcgtgaacccgggaggtggagctggcagtgagctgagatcatgccactgcactctagcctgggcgatagagcgagactctgtctcaaaaaaaaaaaaaagttactcaattccatgatctatccacataaaatcatcttacatacatgtcccgcactctgagaaacactgtcttataggaaaagttgtatgggaaaccaggttttgactagtgagcaaggaatcggatcaggatgaattgtgacatggacttaatgtcactgtcattaagctatgatagtttgatgcatccaattcttataagaacatcctgacccatggccaggatttcggggctacacaccagggcacgctctacagtaggcagggcaagctcaattattcagaatgctgggctgtccctacaaagcatcatatggggtctcttaacactctggttagtttcctttgtctaaaccctctttcttaaaaagtcttctttatttttagtccatttcttccttgcagcttaagattgtgtacattttattcctataagaaatgtgaatgcacaaaactttattttcatcagaaataccaccctgttgaaactgtttcttacagcacgaaaggtaatacaggtagatgaaatgatagtggaagaggaagaagaagaagaaaatgaacgtaagaatcttcaaactgcaagagtaagtggacactgaggttggaggctgggggttatcacaagacaagcaaatacaaatgcataaaatacactgttgtacaccagagctcacagtttagtagagatgatcctactttacatggcaatgacaaaagagataattgactggtgtgcaaagtgtgtagaacacagaagaggaagctagcaagcctcccctaccccactaggacatagacaggcctttcaaggtgagtgagagtctactagctagagaagaaagggaagaggaacagtattcaggatagatgggggaggcggaaaactgaagatgaggaaaccagttagaagcctatgaattcttgaactgacatgctgacactatagaatgaagggatggtttttagataggttttagaaagaagtggcatggttggtggagaaaaggaggaatcagagacaactgcatggtttctagctaaggcaaatgctatccagtgaggtgtgggacccaggtggcagagggtgctggactgggggtggtggagcacatgccaattgcatgacatgttgaccattcattacttttccaggacatctaggctagacagaaatttcagcctggagctcagggagaagagggagatttgagagatacactgcctcccagatctttaggtgtttgtcccagtgtgggagtggagatggttgtgcagggagagcaggaagggagggagtcagggtggacactagagggagggtagagagaggagctcctaaggcagactgccaaggaagttagagaagcaggaaagacagatccatcacggaggacaagggaggagagaatatatggaagataaggagtgattcttgccagggacctcccaggccccaggaagggagcactgcagggtttgcctttgattgggcacctgggacgccctgagtgaccttcacagcagccctttatgtaaagtagtggggtacaagccaggctgcaatcagttcaaaagagatttacctttaatcttggtcaaaatcctctattttgaaaacccagccagtggaagtccttattcaattagttatgttctgaactttttaagtcattgaattctgagatacaccttattatatttagtattaactatccaaagcttgttcttaatgctttaaaaaaaaaaaaaaaaccctccttaccttcctctttgctgggttttttgtaaccttagtctcatttgattgtgactgcaggtcaaaaggtgtcctccatccaagaagagaactcagtccatacaaggaaaaggaaaagggaaaaggtagtggattttctaaagttgtggtgttttgggttttattggagagccatatatatcatggcagaaagtgaggggcagtgaaaaggctctggtggctagtgtttgaaagcagcttaaaatcactgaatccttgagtatccaagctggaggggtctctagaaatgacctaaaccaaaaccatctccagtactttaatgtacattctctatccttccccacttttttttttttttttttttgagacggagtttcaatctcgttggccaggctggagtgcaatggtgcaatcttggctcactgcaacttctgcctcgcgggttcaaatgattctcctgcctcagcctcccgagtagctgggattataggcatgtgccaccatgccggctaattttgtatttttagtagatgcggggtttctccatgttggtcaggctggtcttgaacccccgacctcaggtgatccacccacctcagcccccactttttttttttaagtatagcaagaactgcctgttatgtttcagttcctgatagtccatatgtagagctaccccatagctcgtcatagagtggctgtcacttacctataattggtttcttgaaatgttttgtccagtcctgcaaagtgaagaacctctatgggcttgagttgattatactggactctaccataagccatgtgggggaaggtacagcagcttaggagagtagtcaccgggatgcatgtctgtggaggagcgaactcatttctcttgagcagtgcagcagctgcctggcacaaggacagaattccagctgggggagccttcgcatgaagaggctgtctccttgattaaaaagtcagattctgaggctgagtgtggtgtctcacacctgtaatcccagcactttgggaggccaaggcaggtggatcacttgaggtcaggagtttgagacccgcctggccaacatggtgaaaccctgtctctactaaaaatacaaaaattagccaggtgtggtggtgcatgcctgtagttccagctactcgggaggctgaggcaggagaatcgcttgaacccaggaggtggaggttgcagtgagccaagattacgccattgcactccagcctgggcaacagagcaagactccgtctcaaaaaaaaaaaaaaaagtcagattctggaggcagactactttggttcaaagttttggctccatcctaattggatatgtgatcttgggcaagtttttaaaacttgatgcacctgagtttctgcatctgtgtatgaggatggcagcagtgctggcctcccgtgttagaagggtcacgtgagtcgatgtgtgcgaggcgcccggagcagtatctcacagtcagctctccacgtgtcactcctctgctgctgccttcgtggaacctgagagttggcatacctgatggccatttcttacctgtaggtcaagccgtgctaacactgttaccccagccgtgggccgattggaggtgtccatggtcaaaccaactccaggcctgacacccaggtttgactcaaggtgagtatcgagggaaacacttggatttgatgggactccaacattgagcactacccagagaaggagtgtctaagaaaatactcctaggccaggcacggtagctcacgcctgtaataccagcactttgagaggccgaggcaggcggatcacttgaggtcaggagttcaagaccagcctggccaagatgatgaaacgctgcgtctactaaaaatacaaaaattagttgggtgtggtggtgcacgcctgtaatcccagctactcaggaggctgagacaggagaattgcttgaacccaggaggtggaggttgcagtgagctgcaattgcaccactgcactccagcctgggcaacagagtgagactctgtcttaagaaaagaaaagaaaatagtcccgagtccttggcctgggatgccttgtcagaggacagtggccagctgggtttcctggtgtatgcctctcccttaagtgtagtttcacctatcttcagtggcaaaatgattctttaatgggagggaggtgaatattctgcctgtgatgactaggaggcctctaggtgacgtttttggccttttctgattcaaatcagaaggtttttattttatttttaaaatatttatttattatgaggcagggtctcactccaatgcccaggctggagagcagtggcacaatcacggctcactgcaaccttgacttcccgggctcaagtgcttctcccaccttagctcccaagcatgccaccatgcctggctaattttttgtttttttgtagcgatgggatttcgccaggttgcccaggctggtctcgaactcctgagctcaagcaatctgcccacctcggccttccaatgtactgggattacaagcatgagccatcacacccggcctcaaatcagttttttaaagatgagtaggcactctcctgtactcttggtagaagtaaaaattgatactgcttttttggaggctggcataagcgaggatattcttgcagcataagttaataccttccaaagaacctagttgaccaaataggagatgctgtatagccattaaaaaagactggatctgtgtgtgctgacagggaaagagcaccgtgatcacagagcatctccgagcaggttgctgaacactgtgctgtatgatcccatttggttttatatacatacaaagtttctggaaggatagataaggaattcagagtggttacccctggggaggagagcaagaagtggttatctctggtgtggggaagtgttgaagatttattttctacttttaattgccactttttttttttttttttttttttttttttgagacggagtctcgctctgtcacccaggctggagtgcaatggcacaatctcggctcactgcaacctccacctctcaggttcaagcaattctcctgcctcagcctcctgagtagctgagattataggtacatgccaccatgcccagctaagttttgtatttttaatagagacaggattttgccatgttggccaggctggtctcgaactcctgacctcaggtgatccacccccctcggcctcccaaagtgctgggattacaggtatgagccacggcactcagccagttcccacttttctttactgtttgttttctcacatgaatatgtaacaaaaggcatttagggaaaactaggtagcagtattttaactgtcttgagaaattagtataatgatgtaatatctaaatcatcctcctttgcctctgaaaaattcctcttgatggaagcagccacgcctggaaacaattaaccagcgtatttctggctttgtggatggatggatgatggcacccatatggagctttggacctaaactttatgtggataagagttggctttttgtaagatgtatgttcaataattacaaccttctttctccagctgtgtttagtcattactgctttaaaacattttttttttctaaatttagaacgtgctttcttaggaatgtatgacttaaaaactgcaacttgaggccagagtaaggttaaaatggcctatagagtttggtgtcatccaattgccaagctatcttcacagagattttcccattctagggtcttcaagacccctggcctgcgtactccagcagcaggagagcggatttacaacatctcagggaatggcagccctcttgctgacagcaaagagatcttcctcactgtgccagtgggcggcggagaggtgaagtatttccaagggaagccaggccacagtgtgctgcttagtcaagcatttcttttccctgggccctcacccacgcttcaccctcagagtcctttcagtgcgtgggtcctgatctccacacttctgcgggactcagaacccagttttctctcccaggttagaggcccagactgcaaagatcgttgctcagctctgggttctgtttttctgttttttggttttgtttttgttttttgtgggttttttttttttttttttgagatggagtcttgctctgtcaccaggcgggagtgcagtggtgcgatctcggctcactgcaacctctgcctcctgggttcaagcgattctcttgcctcagcctcctgagtagctgggactacaggcacacgccatcatgcccagctaacttttgtatttttggtagagatgggggtttcaccacgttggccaggatggtctcgattgcttgacctcgtgatccgccctcctcggcgtcccaaagtgctgggattacaggcatgagccaccgtgcccaccttttttttttttttttttgagatggagtctcactctgtcgcccagcctggagtgcagtggcacgatctcagctcactgcaacctctgcctcccaggttcaagtgattctcctgcctcagcctcctgagtaactgggactacaggcacatgccaccacacccggctaatttttgtatttttagtagagatggtgtttcaccatattggtcaagctggtctcaaactcctgacctcaggtgatccacacacctcagcctcccaaggtgctgggattacaggtgcaagccaccacacccggcctccatctgttcatcaactaacatttgcccatccgattgtagtaggcccaagaagtagacatggggcctgcccttagaaagcagctcagtggtcaagatgggtttgcaatcatggtacctgtgatatgcgcaataatagagatgttaaagggtggtgcagaggagggcaccaccgaggtatgcgcttagtctagaacccggaccatgagctgtgccttcagctttgtataacttaagggattctgaagcaagctgagctcagtgtctctgggctgcatggagcgagttgctgacctcagcccctgtgaggggaggacggtttgtttcagacatactctgcagggcatttcttagatgatgtgcgtgccttttgtgcccaggtaatccagcctccaccctagtgatagtgctgatgaagtcattgtctccttagagctaatatccttcctgcctgtcttgccacttctccatcccagccattccccaccactaagtgcaggatatcaggggaacctaggggttccggccctaagggccatggccagtttaacccactcccctttctattcagagcctgcgattattggccagtgacttgcagaggcacagtattgcccagctggatccagaggccttgggaaacattaagaagctctccgtaagtctcatattcatctccacacataggatgcctccagtagctttcttgggctacctttatttaggattgtcttttgggcctgggctaatactttctacttaaatttgtgttgtcttccttcccccaagagattttgactcttaccctacttagatagcagcagttctgttcctcagttgatgttgagttttgttcaatcccagggtgcctgccacagaagttccactgcaaaatcaaaattctgcctcattcaggcagttagtgctaggggtatgttaggtcactattggccaccagaaagtgaaacctagagtagctcaagaatgagggtcggggcttgttatcaggaatcttacagaatcaaagagcgagctgaacggccaagcctctggagtggtggggcccatcagctggggcctgtgtgctcatttctctcacacatcttcattcctccctcagcagataaccttctccacaggctccaggttctgtgcttacttaacattgttttgcatgtggctttgagtaaccacacctccaatcccaactttattgctctattgcccaattgttcaatttcttgtcttggtttaaattctgaagagggccaggcacagtggcacacacctgtaatccctgcagctcaggaggctcaggtgagagaaattgtttgagcccatgagttcaaggctgcagtgacccatgatcgtgctgctgcactccagcctgggtgacagagaaagacctcagctctaaaaataaagtaaattatcaatttaatttaactgaagaatgtaatggctccgccagggatgaacctccttggtctggtcagccatcatcttgggtggtggatgaagcacttagtgtaaacatggcaaccttaccctcatccttctgtggggtctgaagggtacatccaaggaaggggacaaggcggggctggtttcctaaacctgtctttctgaacataggcccagtgctgagatcccacacacacctagccacccaaatcttgtgactgtcatcctctagctagatctattgcaatgttcttctcaaatctatgatacctttactgtctcacttgagttgttattttactcccttgttcagatgagaaacaggttcagaaaggtgaattcatgtgtgatacagatagagaatggaggggctcaggctgactgtgggaggccaaggggcaagcctgccaagtgacatcttctacaatgacctctctccttttctttttagaaccgtctcgcccaaatctgcagcagcatacggacccacaaatgagacaccaaagttgacaggatggacttttaatgggcacttctgggaccctgaagagacttcttcccttcaggcttattgtttgagtgtgaagttccagagcaaggagccatgttcctctaagggaattcaggaattcagacgtgctagtcccacaccagttaggtagagctgtctgttcaccctcccatcccagctgatcccagtcactgcttgctggggccatgccatggaagcttcccatcagtctcccagctgaatcctccctgctctctgagctgctgccttttgcctcctgcaactcaacatcctcttcaccctgccctgcctgcagttgagggggcgaagaagaaccctgtgttctcaggaagactgcctccaccaccgctacccagagaacctctgcatctggcatttctgctctctatgcttgagaccgggaggtttaggctcagataagtgagctctgggccatgagagggtaggtccagaaggtggggggaactgtacagatcagcagagcaggacagttggcagcagtgacctcagtagggaacatgtccgtctaccctctcgcactcatgacacctccccctaccagccctcctcttcctcctcctcctcctcctgtgggaggtggtcagtgggacttagggatctttcacctgctgtgcccagtagttctgaagtctgcttgtggagcagtgttttatgtttatccctgtttactgaagaccaaatactggtttggagacaacttccatgtcttgctcttctacctccctagttagtggaaatttggataagggaactgtagggcccagattctggaggttttatgtcattggccacagaataactgtctctaagctatccatggtccagtggtccctgccaagtctgtagacttcagagagcacttctctcttatggggttcatgggaacaggggtgggtgtgacttgcttggtggcctcattccatgtgtgcctgtgcctggggcatggactttgttaagcagagtcagcagtgaggtcctcattctccagccagcctctctgccctggagaatcatgtgctatgttctaagaatttgagaactagagtcctcatccccaggcttgaaggcacatggctttctcatgtagggctctctgtggtatttgttattattttgcaacaagaccattttagtaaaacagtcctgttcaagttgtattcttttaagttcttttattctcctttccctgagatttttgtatatattgttctgagtaatggtatctttgagctgattgttctaatcagagctggtacctactttcaataaattctggttttgtgttttcttttgtaa

SEQ ID NO: 2327 - DNA, 7960 bp, Homo sapiens
gtcaaaaggtgtcctccatccaagaagagaactcagtccatacaaggaaaaggaaaagggaaaaggtagtggattttctaaagttgtggtgttttgggttttattggagagccatatatatcatggcagaaagtgaggggcagtgaaaaggctctggtggctagtgtttgaaagcagcttaaaatcactgaatccttgagtatccaagctggaggggtctctagaaatgacctaaaccaaaaccatctccagtactttaatgtacattctctatccttccccacttttttttttttttttttttttgagacggagtttcaatctcgttggccaggctggagtgcaatggtgcaatcttggctcactgcaacttctgcctcgcgggttcaaatgattctcctgcctcagcctcccgagtagctgggattataggcatgtgccaccatgccggctaattttgtatttttagtagatgcggggtttctccatgttggtcaggctggtcttgaacccccgacctcaggtgatccacccacctcagcccccactttttttttttaagtatagcaagaactgcctgttatgtttcagttcctgatagtccatatgtagagctaccccatagctcgtcatagagtggctgtcacttacctataattggtttcttgaaatgttttgtccagtcctgcaaagtgaagaacctctatgggcttgagttgattatactggactctaccataagccatgtgggggaaggtacagcagcttaggagagtagtcaccgggatgcatgtctgtggaggagcgaactcatttctcttgagcagtgcagcagctgcctggcacaaggacagaattccagctgggggagccttcgcatgaagaggctgtctccttgattaaaaagtcagattctgaggctgagtgtggtgtctcacacctgtaatcccagcactttgggaggccaaggcaggtggatcacttgaggtcaggagtttgagacccgcctggccaacatggtgaaaccctgtctctactaaaaatacaaaaattagccaggtgtggtggtgcatgcctgtagttccagctactcgggaggctgaggcaggagaatcgcttgaacccaggaggtggaggttgcagtgagccaagattacgccattgcactccagcctgggcaacagagcaagactccgtctcaaaaaaaaaaaaaaaaagtcagattctggaggcagactactttggttcaaagttttggctccatcctaattggatatgtgatcttgggcaagtttttaaaacttgatgcacctgagtttctgcatctgtgtatgaggatggcagcagtgctggcctcccgtgttagaagggtcacgtgagtcgatgtgtgcgaggcgcccggagcagtatctcacagtcagctctccacgtgtcactcctctgctgctgccttcgtggaacctgagagttggcatacctgatggccatttcttacctgtaggtcaagccgtgctaacactgttaccccagccgtgggccgattggaggtgtccatggtcaaaccaactccaggcctgacacccaggtttgactcaaggtgagtatcgagggaaacacttggatttgatgggactccaacattgagcactacccagagaaggagtgtctaagaaaatactcctaggccaggcacggtagctcacgcctgtaataccagcactttgagaggccgaggcaggcggatcacttgaggtcaggagttcaagaccagcctggccaagatgatgaaacgctgcgtctactaaaaatacaaaaattagttgggtgtggtggtgcacgcctgtaatcccagctactcaggaggctgagacaggagaattgcttgaacccaggaggtggaggttgcagtgagctgcaattgcaccactgcactccagcctgggcaacagagtgagactctgtcttaagaaaagaaaagaaaatagtcccgagtccttggcctgggatgccttgtcagaggacagtggccagctgggtttcctggtgtatgcctctcccttaagtgtagtttcacctatcttcagtggcaaaatgattctttaatgggagggaggtgaatattctgcctgtgatgactaggaggcctctaggtgacgtttttggccttttctgattcaaatcagaaggtttttattttatttttaaaatatttatttattatgaggcagggtctcactccaatgcccaggctggagagcagtggcacaatcacggctcactgcaaccttgacttcccgggctcaagtgcttctcccaccttagctcccaagcatgccaccatgcctggctaattttttgtttttttgtagcgatgggatttcgccaggttgcccaggctggtctcgaactcctgagctcaagcaatctgcccacctcggccttccaatgtactgggattacaagcatgagccatcacacccggcctcaaatcagttttttaaagatgagtaggcactctcctgtactcttggtagaagtaaaaattgatactgcttttttggaggctggcataagcaaggatattcttgcagcataagttaataccttccaaagaacctagttgaccaaataggagatgctgtatagccattaaaaaagactggatctgtgtgtgctgacagggaaagagcaccgtgatcacagagcatctccgagcaggttgctgaacactgtgctgtatgatcccatttggttttatatacatacaaagtttctggaaggatagataaggaattcagagtggttacccctggggaggagagcaagaagtggttatctctggtgtggggaagtgttgaagatttattttctacttttaattgccacttttttttttttttttttttttgagacggagtctcgctctgtcacccaggctggagtgcaatggcacaatctcggctcactgcaacctccacctctcaggttcaagcaattctcctgcctcagcctcctgagtagctgagattataggtacatgccaccatgcccagctaagttttgtatttttaatagagacaggattttgccatgttggccaggctggtctcgaactcctgacctcaggtgatccaccccccctcggcctcccaaagtgctgggattacaggtatgagccacggcactcagccagttcccacttttctttactgtttgttttctcacatgaatatgtaacaaaaggcatttagggaaaactaggtagcagtattttaactgtcttgagaaattagtataatgatgtaatatctaaatcatcctcctttgcctctgaaaaattcctcttgatggaagcagccacgcctggaaacaattaaccagcgtatttctggctttgtggatggatggatgatggcacccatatggagctttggacctaaactttatgtggataagagttggctttttgtaagatgtatgttcaataattacaaccttctttctccagctgtgtttagtcattactgctttaaaacattttttttttctaaatttagaacgtgctttcttaggaatgtatgacttaaaaactgcaacttgaggccagagtaaggttaaaatggcctatagagtttggtgtcatccaattgccaagctatcttcacagagattttcccattctagggtcttcaagacccctggcctgcgtactccagcagcaggagagcggatttacaacatctcagggaacggcagccctcttgctgacagcaaagagatcttcctcactgtgccagtgggcggcggagaggtgaagtatttccaagggaagccaggccacagtgtgctgcttagtcaagcatttcttttccctgggccctcacccacgcttcaccctcagagtcctttcagtgcgtgggtcctgatctccacacttctgcaggactcagaacccagttttctctcccaggttagaggcccagactgcaaagatcgttgctcagctctgggttctgtttttctgttttttggttttgtttttgttttttgtgggtttttttttttttttttgagatggagtcttgctctgtcaccaggcgggagtgcagtggtgcgatctcggctcactgcaacctctgcctcctgggttcaagcgattctcttgcctcagcctcctgagtagctgggactacaggcacacgccatcatgcccagctaacttttgtatttttggtagagatgggggtttcaccacgttggccaggatggtctcgatcgcttgacctcgtgatccgccctcctcggcgtcccaaagtgctgggattacaggcatgagccaccgtgcccaccttttttttttttttttgagatggagtctcactctgtcgcccagcctggagtgcagtggcacgatctcagctcactgcaacctctgcctcccaggttcaagtgattctcctgcctcagcctcctgagtaactgggactacaggcacatgccaccacacccggctaatttttgtatttttagtagagatggtgtttcaccatattggtcaagctggtctcaaactcctgacctcaggtgatccacacacctcagcctcccaaggtgctgggattacaggtgcaagccaccacacccggcctccatctgttcatcaactaacatttgcccatccgattgtagtaggcccaagaagtagacatggggcctgcccttagaaagcagctcagtggtcaagatgggtttgcaatcatggtacctgtgatatgcgcaataatagagatgttaaagggtggtgcagaggagggcaccaccgaggtatgcgcttagtctagaacccggaccatgagctgtgccttcagctttgtataacttaagggattctgaagcaagctgagctcagtgtctctgggctgcatggagcgagttgctgacctcagcccctgtgaggggaggacggtttgtttcagacatactctgcagggcatttcttagatgatgtgcgtgccttttgtgcccaggtaatccagcctccaccctagtgatagtgctgatgaagtcattgtctccttagagctaatatccttcctgcctgtcttgccacttctccatcccagccattccccaccactaagtgcaggatatcaggggaacctaggggttccggccctaagggccatggccagtttaacccactcccctttctattcagagcctgcgattattggccagtgacttgcagaggcacagtattgcccagctggatccagaggccttgggaaacattaagaagctctccgtaagtctcatattcatctccacacataggatgcctccagtagctttcttgggctacctttatttaggattgtcttttgggcctgggctaatactttctacttaaatttgtgttgtcttccttcccccaagagattttgactcttaccctacttagatagcagcagttctgttcctcagttgatgttgagttttgttcaatcccagggtgcctgccacagaagttccactgcaaaatcaaaattctgcctcattcaggcagttagtgctaggggtatgttaggtcactattggccaccagaaagtgaaacctagagtagctcaagaatgagggtcggggcttgttatcaggaatcttacagaatcaaagagcgagctgaacggccaagcctctggagtggtggggcccatcagctggggcctgtgtgctcatttctctcacacatcttcattcctccctcagcagataaccttctccacaggctccaggttctgtgcttacttaacattgttttgcatgtggctttgagtaaccacacctccaatcccaactttattgctctattgcccaattgttcaatttcttgtcttggtttaaattctgaagagggccaggcacagtggcacacacctgtaatccctgcagctcaggaggctcaggtgagagaaattgtttgagcccatgagttcaaggctgcagtgacccatgatcgtgctgctgcactccagcctgggtgacagagaaagacctcagctctaaaaataaagtaaattatcaatttaatttaattgaagaatgtaatggctccgccagggatgaacctccttggtctggtcagccatcatcttgggtggtggatggagcacttagtgtaaacatggcaaccttaccctcatccttctgtggggtctgaagggtacatccaaggaaggggacaaggcggggctggtttcctaaacctgtctttctgaacataggcccagtgctgagatcccacacacacctagccacccaaatcttgtgactgtcatcctctagctagatctattgcaatgttcttctcaaatctatgatacctttactgtctcacttgagttgttattttactcccttgttcagatgagaaacaggttcagaaaggtgaattcatgtgtgatacagatagagaatggaggggctcaggctgactgtgggaggccaaggggcaagcctgccaagtgacatcttctacaatgacctctctccttttctttttagaaccgtctcgcccaaatctgcagcagcatacggacccacaaatgagacaccaaagttgacaggatggacttttaatgggcacttctgggaccctgaagagacttcttcccttcaggcttattgtttgagtgtgaagttccagagcaaggagccatgttcctctaagggaattcaggaattcagacgtgctattcccacaccagttaggtagagctgtctgttcaccctcccatcccagctgatcccagtcactgcttgctggggccatgccatggaagcttcccatcagtctcccagctgaatcctccctgctctctgagctgctgccttttgcctcctgcaactcaacatcctcttcaccctgccctgcctgcagttgagagggcgaagaagaaccctgtgttctcaggaagactgcctccaccaccgctacccagagaacctctgcatctggcatttctgctctctatgcttgagaccgggaggtttaggctcagataagtgagctctgggccatgagagggtaggtccagaaggtggggggaactgtacagatcagcagagcaggacagttggcagcagtgacctcagtagggaacatgtccgtctaccctctcgcactcatgacacctccccctaccagccctcctcttcctcctcctcctcctcctgtgggaggtggtcagtgggacttagggatctttcacctgctgtgcccagtagttctgaagtctgcttgtggagcagtgttttatgtttatccctgtttactgaagaccaaatactggtttggagacaacttccatgtcttgctcttctacctccctagttagtggaaatttggataagggaactgtagggcccagattctggaggttttatgtcattggccacagaataactgtctctaagctatccatggtccagtggtccctgccaagtctgtagacttcagagagcacttctctcttatggggttcatgggaacaggggcgggtgtgacttgcttggtggcctcattccatgtgtgcctgtgcctggggcatggactttgttaagcagagtcagcagtgaggtcctcattctccagccagcctctctgccctggagaatcatgtgctatgttctaagaatttgagaactagagtcctcatccccaggcttgaaggcacatggctttctcatgtagggctctctgtggtatttgttattattttgcaacaagaccattttagtaaaacagtcctgttcaagttgtattcttttaagttcttttattctcctttccctgagatttttgtatatattgttctgagtaatggtatctttgagctgattgttctaatcagagctggtacctactttcaataaattctggttttgtgttttcttttgtaa

SEQ ID NO: 2328 - DNA, 426 bp, Homo sapiens
aggccaagctgtgaggattacttgagcccaggagttcaagaccagcctgggcaatgtagtgagaccttgtctctgaaaaaaaaaagaaagaaagaaaggaaaggaaaggaaaggaaaaaaaaagttactcagctaggcgtggtggctcacgcctgtaattcaagcactttgggaggccgaggtgggtggatcacgaggtcaggagttcgagaccatcctggctaatacggtgaacccccgtctctactaaaaaatacaaaaaattagccgggcgtggtggcgggcgcctgtagtcccagctacttgggaggctgagacaggagaatggcgtgaacccgggaggtggagctggcagtgagctgagatcatgccactgcactctagcctgggcgatagagcgagactctgtctcaaaaaaaaaaaaaa

SEQ ID NO: 2329 - DNA, 442 bp, Homo sapiens
gcagccccgcgctgcgcacccagtcgaggcgccaacacgcgaactgggcgggagtggccggcccgcgggggagcgaggaacgacagggttccccccactcgctgcccagactggccgcgggatagcgcgccccccccaaagcctgcacccctgccctgctcctctatcattccgtcccccttgctctgtcaaaccctgccggggctgctctgtctctgccgacccgccacttgcccgaagttcggcctgaggagcttggggccctgaggagcgccgacgtaggcagccagccagtcaatcagtcagagggtcacggcggcccctcggctactcagtggcagccaggccagaaagaagcagccgccaaccctggagcagaatcctacagccgacctgacctagtaggcccccagccctccagagcttggggtattgcagagcc

SEQ ID NO: 2330 - DNA, 638 bp, Homo sapiens
acatctgcttttctcagatgtgaaaacctttgctttgggcagattcattctgatatctgaaagaggggcttactacaagatccagagcatcggtaccttcaacccccagcagagcgcccccaacaccttcattccatgagctagaaatttgtgtctgggaggacaacacctagggtctctgtaatttcccagtatagtagacttttcttggccaggaacaaagcggggcaagagtaattcggtgatcatgagtctcacttcccaaagtttctgaggccctggcagatctgccttcccggaactctctaggctgaaaatgatcaacctagagctaatgatgcaagagggttctgcctaaaagaagacaacctgggggcatacttagccaggttattgggtattgacaatttatagactaggaatcttctggtagtgacagcatttggaagaatggttactcagtgcaaataagcaacccagactatatgtcatcaggcctaaagagcctgacaccaaggaaacacttaggatccaacctgctttacccagaaccaggttcatcctgtttcattccatctgcaccactgcctaaatcacctagtaggaaatgcatgttatgtagcaggtgcctaattaac

SEQ ID NO: 2331 - DNA, 964 bp, Homo sapiens
gaggcaaatggcattgtataatatgtctgtacaaaaaacaaacaaaaaaccaaacaagggcaaatagaaccctttggattggtattgtactatctgtttctgaagacccagaaacagaaaacaaacttttccccagacttactgtttccttgagaatcctttttctttgttcttcatactttaacttccataaggagctggctcctctgcctataaataagagcttagagaaatacttcaaaaagctacctacagttagctaaatattaccaagtctgcctggtacatgtttcattatatttccttgcctcagtttgttatctagatttaatttacactccatgtgatatagctgttaaattagaaatgagattctttcttctgctttagcaaaattcagtgacaatttttagctccatttccaatttttacatatgtgcgatcacttggttcatactgataactgaactgactcagtctcatatttatcaggtcagataactgtgcttaaccgtgcatagtgggccagtcatcatttatgtgtcatcttctttatttgctttgtgaacactcaccacagcacctatttttctctggtattttttatactaattttcttgttagaatagtttccttaatgtacagaaattgaactagataattacagttgttctaaatatatttttctggacatttaaagaaatcattctaacaccagagattaatgttacctgttttagtattttatacaaattgattcctacagtgtaagctgtattgtactgtatacttcaattcatatgataaagaaatacaatgggctgtaacaatacactaaaaacaggaatgagtgaggggttaagttcacttggagtattacacctatcctttgcatctactgttttctgtgaaattttacagcagtgatgcccttccatataggttcttccatataaaatgtgat

SEQ ID NO: 2332 - DNA, 459 bp, Homo sapiens
gcttaaccgtgcatagtgggccagtcatcatttatgtgtcatcttctttatttgctttgtgaacactcaccacagcacctatttttctctggtattttttatactaattttcttgttagaatagtttccttaatgtacagaaattgaactagataattacagttgttctaaatatatttttctggacatttaaagaaatcattctaacaccagagattaatgttacctgttttagtattttatacaaattgattcctacagtgtaagctgtattgtactgtatacttcaattcatatgataaagaaatacaatgggctgtaacaatacactaaaaacaggaatgagtgaggggttaagttcacttggagtattacacctatcctttgcatctactgttttctgtgaaattttacagcagtgatgcccttccatataggttcttccatataaaatgtgat

SEQ ID NO: 2333 - DNA, 964 bp, Homo sapiens; identical to SEQ ID NO: 2331

SEQ ID NO: 2334 - DNA, 454 bp, Homo sapiens
taaccccacacccatcttcaagttattttgaagactaattctttattttgtgttgctgcttgcagttacataaaattgagacattaactagggttctttttgagggtgcaaataatacttttaaggaattcacttaacagcaaatttgtttcataagaaaacttttctcctttctttagcttctttgaaagaaaggatgccttgatggaaagtggaatcagtgggggaagagtaattttggttacagcagtattgatagggtactgagacgagaggccttggaccaccagattgtgataaagtttaaggacatagatgagaaggaaattacctggatgaaagagagttgtgaaatctgaaaggtagtttgggagaactaaaaacaatcttggatatatgtttagttttgcccagagtctatccagactccttaagatgcttaggatttggtggg

SEQ ID NO: 2335 - DNA, 416 bp, Homo sapiens
tcctgctttgtctatcatcacttgtatgtttccttgcagtgtggcctcaggaaacaagtgtatttttctgtcagacagaacacaagttgcatagataaatattaaaactagtactcatgaaagcataacccattagtggacttaggtacagacacaaatacttaagtcagcaggaagtttactctttccttaggttactactccatgagagtaagattgaccatatcataatgtttggagccctttctgaagcattttctaccgtgggtaaaatgatgtaggtaaaaatatattggctgggcgtggtggctcacacctataatcccagcactttgggaggccgaggtgggcagatcacgaggtcaggagttcgagaccatggccaacatggtgtatcccgtctttactaaaaatac

SEQ ID NO: 2336 - DNA, 453 bp, Homo sapiens
aaccccacacccatcttcaagttattttgaagactaattctttattttgtgttgctgcttgcagttacataaaattgagacattaactagggttctttttgagggtgcaaataatacttttaaggaattcacttaacagcaaatttgtttcataagaaaacttttctcctttctttagcttctttgaaagaaaggatgccttgatggaaagtggaatcagtgggggaagagtaattttggttacagcagtattgatagggtactgagacgagaggccttggaccaccagattgtgataaagtttaaggacatagatgagaaggaaattacctggatgaaagagagttgtgaaatctgaaaggtagtttgggagaactaaaaacaatcttggatatatgtttagttttgcccagagtctatccagactccttaagatgcttaggatttggtggg

SEQ ID NO: 2337 - DNA, 2082 bp, Homo sapiens
tttgtgttgggccgcattcaaagctgtcctgggccacgtacaggctgtgagttggacaagcttgatctaaattaatgaagattattttgtatttcaaaattatttttgagccatcacaattaacagctaactctcatctttttatacattagtcctgattatttctattttgtgaaacaagattttaatccttaattcactaaaaatgcttgcccttcctataatagtgtaaaaagaccagttgatttttgtgcatgaaaattatgagctaggtataacaacatcgtgtgtttggtgcctactcatccctaacaaacaatgttcagctctcagtctacttctctgcattgtatttataaaaaataaattgtggctcagaggttaagtaacttcccaagggaagctggaaagcaaagagcttgcataagaacccaagatggctagaccaccaatcttctggtagtcaccacagggaaagtttgatgaaatgatttaaaagattggaaaactatttgaaataaacgctcatttgcattgatagctacttttggaatatttttcttctaatcaagagtttaagaaatattgttaaaatgtatcttactgaggaaagtaacttgcaaaaaacagtacattgccaaaagcagtatacacattgcctaaccaacacttaacccagtgtctatgaacttcacattgcctcacgccatatggaatgtgttgattcattcactgttccgtttttatctacaattttggtttaacaaggctatgtatttaaaataatttttaaactctttacaggtaagtcacttttgagttgtaaaattccagaagtgacttttcttgaagtaggctttaatgaaaaatctattaatacactgaaaaccaactgtacaccaaaacagggctgtttatctccctgacttgtttgaagactgagttgatagccacctcagacttagctcattctcttcctatccacatctgccctcaatttggactttggttggctgtatttataagtaaaaggccatgttctttcacctgcagatatgcagttttaccagtggtacctgtgtttgaaacccactgactgttcctccttgtcctgttccttgtcctaactccagtctctcaacttgggattttcctaatttaataccttattgtgtagaatagtggctcccaaactttattgtgtacgaaaatagacctggttgaaatgcagatcctcagttctcatgcccattgcttctgacttggttggctggggatgaagtccaggaatctgcactttgttttttttaaaccccaacatctcctatacccatcatcctactaacccctctttgggctttaaggaatagtaataggtgcttcccaattacagaaggagaggcagcacttctaaaaagatgttgtgttgatggggaaggtgatccctcttcctgacctctggccctagtgtcctcaggttaacaggagaccagtttttcttccttattagcaatatctgagtacagctttggctacctgcaaagaaaaataaagcaaaacctttcccttaatggaaattgaggaggaatctgcacttttaatgatcatccaggtggttctcatgtaggtgccccaggactaccctttgacactgctctagctgcctagaatgttgtttcttttatgtaaaaaaatacatacatatctcaagcatagtaagaataatatgaagtaactccgagtgaattgagtccattcttataaataagcttttaaattttacacatgccaaggacttttagcagcctttttgaccctcgtgctctaaaaatgatccgtcagtgaggagaagaggcagaatgaatagtccctgacttaaaatcatccttttttttttttttacattgaaactgttgattgaaacaggattcctttaaagtcagcctcactttttctcaggcctgaatcttagaacatattgtcagatattcagctgtgctctcgcctccaacccacttttattcctaaatgtgttcgtttatacatggagtgtttgctgttgtgatttaaaaaaaaaaaaaa

SEQ ID NO: 2338 - DNA, 2082 bp, Homo sapiens
tttgtgttgggccgcattcaaagctgtcctgggccacgtacaggctgtgagttggacaagcttgatctaaattaatgaagattattttgtatttcaaaattatttttgagccatcacaattaacagctaactctcatctttttatacattagtcctgattatttctattttgtgaaacaagattttaatccttaattcactaaaaatgcttgcccttcctataatagtgtaaaaagaccagttgatttttgtgcatgaaaattatgagctaggtataacaacatcgtgtgtttggtgcctactcatccctaacaaacaatgttcagctctcagtctacttctctgcattgtatttataaaaaataaattgtggctcagaggttaagtaacttcccaagggaagctggaaagcaaagagcttgcataagaacccaagatggctagaccaccaatcttctggtagtcaccacagggaaagtttgatgaaatgatttaaaagattggaaaactatttgaaataaacgctcatttgcattgatagctacttttggaatatttttcttctaatcaagagtttaagaaatattgttaaaatgtatcttactgaggaaagtaacttgcaaaaaacagtacattgccaaaagcagtatacacattgcctaaccaacacttaacccagtgtctatgaacttcacattgcctcacgccatatggaatgtgttgattcattcactgttccgtttttatctacaattttggtttaacaaggctatgtatttaaaataatttttaaactctttacaggtaagtcacttttgagttgtaaaattccagaagtgacttttcttgaagtaggctttaatgaaaaatctattaatacactgaaaaccaactgtacaccaaaacagggctgtttatctccctgacttgtttgaagactgagttgatagccacctcagacttagctcattctcttcctatccacatctgccctcaatttggactttggttggctgtatttataagtaaaaggccatgttctttcacctgcagatatgcagttttaccagtggtacctgtgtttgaaacccactgactgttcctccttgtcctgttccttgtcctaactccagtctctcaacttgggattttcctaatttaataccttattgtgtagaatagtggctcccaaactttattgtgtacgaaaatagacctggttgaaatgcagatcctcagttctcatgcccattgcttctgacttggttggctggggatgaagtccaggaatctgcactttgttttttttaaaccccaacgtctcctatacccatcatcctactaacccctctttgggctttaaggaatagtaataggtgcttcccaattacagaaggagaggcagcacttctaaaaagatgttgtgttgatggggaaggtgatccctcttcctgacctctggccctagtgtcctcaggttaacaggagaccagtttttcttccttattagcaatatctgagtacagctttggctacctgcaaagaaaaataaagcaaaacctttcccttaatggaaattgaggaggaatctgcacttttaatgatcatccaggtggttctcatgtaggtgccccaggactaccctttgacactgctctagctgcctagaatgttgtttcttttatgtaaaaaaatacatacatatctcaagcatagtaagaataatatgaagtaactccgagtgaattgagtccattcttataaataagcttttaaattttacacatgccaaggacttttagcagcctttttgaccctcgtgctctaaaaatgatccgtcagtgaggagaagaggcagaatgaatagtccctgacttaaaatcatccttttttttttttttacattgaaactgttgattgaaacaggattcctttaaagtcagcctcactttttctcaggcctgaatcttagaacatattgtcagatattcagctgtgctctcgcctccaacccacttttattcctaaatgtgttcgtttatacatggagtgtttgctgttgtgatttaaaaaaaaaaaaaa

SEQ ID NO: 2339 - DNA, 592 bp, Homo sapiens
cactgaggcctgcctgagggtggagggcgggaggagggaaaggagcaaaaaaaataactatcgggtactgggcttagtaccggggtgatgaaatattctgtacaacaagcccctgtgattcaagttgacccaaataacaaacctgcacatgtgcccctgaacctaaaataaaagtttaaagcagagtcagaataattaaaaaatgaaatccacatcttgaaaagaaaagataattgtcctttaggaatgcatagtcataaaggagagctgtaactctcttggatacattttatattatgtccgacaatcccagttaatcagatcattttgaaagtgtcagcctttgaaatagattacagttaaatggtctacatctgcagcagacattttgcctctaggataagattctttccagagtcatgttgaataacagctggtgcaatagagggccatgattatgatctttagagttctttttgcttttcattaatgttaatccttggaatcagacttttcatctaaatcaggggtgtccaatcttttggcttccccgggccacgttggaagaagaattgtctagtgccacacataa

SEQ ID NO: 2340 - DNA, 288 bp, Homo sapiens
attgtcttcccacctgtgagtcacactttgtcagcactacccagtatagggggggaaaggtcatttttttacctgccttatcttggaatcttttcagcagtgcttccacaagagaattaagccctactaccctgaggcatccatggtacgtgtgaattaactttgtcttctacatctcaggctgggaaaaatagccagtcagatcccgctgggtgttctgtggttaggctctcaaagaggctggagttctagggccgggcatagtggctcaagccagtaattccagca

SEQ ID NO: 2341 - DNA, 592 bp, Homo sapiens
cactgaggcctgcctgagggtggagggcgggaggagggagaggagcagaaaaaataactatcgggtactgggcttagtaccggggtgatgaaatattctgtacaacaagcccctgtgattcaagttgacccaaataacaaacctgcacatgtgcccctgaacctaaaataaaagtttaaagcagagtcagaataattaaaaaatgaaatccacatcttgaaaagaaaagataattgtcctttaggaatgcatagtcataaaggagagctgtaactctcttggatacattttatattatgtccgacaatcccagttaatcagatcattttgaaagtgtcagcctttgaaatagattacagttaaatggtctacatctgcagcagacattttgcctctaggataagattctttccagagtcatgttgaataacagctggtgcaatagagggccatgattatgatctttagagttctttttgcttttcattaatgttaatccttggaatcagacttttcatctaaatcaggggtgtccaatcttttggcttccccgggccacgttggaagaagaattgtctagtgccacacataa

SEQ ID NO: 2342 - DNA, 288 bp, Homo sapiens; identical to SEQ ID NO: 2340

SEQ ID NO: 2343 - DNA, 370 bp, Homo sapiens
cttggcctgaggagaactcagaggacagagatagttttcatgggaacacgtggagcatccggaggttgtttatggtcatgagggaaagagatgtggtgtggaaaatacgatcttgtgaaaaagtagggatgcattagttctcaagtcaggaaaatgaggaggtggagtcaagcgatgctacaggagactgtttgccacaaagagttgctgctgtgcctgccccagagcacttgggcccaaagaagccacctctgcagcctcactactcatcgtggctgggtttggtctccacagatgggctttcactcacatggtgctcaccagtgcccactgctgccatctgggccaggtgtggagccaaaacatagaa

SEQ ID NO: 2344 - DNA, 370 bp, Homo sapiens; identical to SEQ ID NO: 2343

SEQ ID NO: 2345 - DNA, 530 bp, Homo sapiens
gctcaatggaaatagcagtgtgatgtggctgcccaaaaatgccatgaggtttctgctgttttaataggactgggatgtctcagataagacaagacagtgccactgtactcttcactgggcatatcttaccacacatgatttcctttcttatcacctcatttttagaaggatgtgcacaaaccggaacaaggtcagagagcaaggagacgagtgagggaaattgacatcacgtcttaaaaggaagaaatggggttgggcctgatggctcacacctataattccagcactttcagaggccggggcgggtagatcatttgaggccaggagttcgagaccagcctggccatggtgaaaccccatctccaccaaacatacaaaaattagccaggcatggcagcacatgcctgtaatcccagctactctggaggctgtaacacaagagtcacttaaacctgggaagtggagtttgcaatgagccaagatcacgtcacttcactccagcctgggcaacagagcgagactccatctca

SEQ ID NO: 2346 - DNA, 530 bp, Homo sapiens
gctcaatggaaatagcagtgtgatgtggctgcccaaaaatgccatgaggtttctgctgttttaataggactgggatgtctcagataagacaagacagtgccactgtactcttcactgggcatatcttaccacacatgatttcctttcttatcacctcgtttttagaaggatgtgcacaaaccggaacaaggtcagagagcaaggagacgagtgagggaaattgacatcatgtcttaaaaggaagaaatggggttgggcctgatggctcacacctataattccagcactttcagaggccggggcgggtagatcatttgaggccaggagttcgagaccagcctggccatggtgaaaccccatctccactaaacatacaaaaattagccaggcatggcagcacatgcctgtaatcccagctactctggaggctgtaacacaagagtcacttaaacctgggaagtggagtttgcaatgagccaagatcacgtcacttcactccagcctgggcaacagagcgagactccatctca

SEQ ID NO: 2347 - DNA, 1801 bp, Homo sapiens
cctgtaatcccagctacttgggaggctgaggcaggagaattgcttgaacccgcgaggcggaggttgcagtgagctgagatcatgccattgcactccagcctgggcaacaagagcgaaactctgtctcaaagaaaaaaaaagaaaattggttagttttctaaattgcattgaaaattttataaataatagaagcccgagagaaagccacacagcaaaactttctctctctgccaatgaaatgtattattttcagccacctctttttaaaaacaatattatcttcattcctgtacccttcattttgctttgtatttttgagagcgctggttgccttaaaatcagtatctcaaatctctggcaaagttccttctgtttctttgactctatgaccctgatattttctagaggtagctggtgtcaatttgagaagcatccagaggagtgaatagaaaagaggccttagcattaaaaagactaaatttaaatccttgttccgccacttcctaactgtgtgaccttgggcaagttaatacacatgctgagcttggattaatcagtggaggcttgtaggacacctactgtgatggcaaattctgtgtttgtttctagcaggagagattttaaaaagaagttaaagaaaaaaatatgtgagactatgatattctcccatattatcaaaaacacttattttcctcaatgtaggaatagtgcaagcctgtcgacccagctattttagaggctgaagtgggagcatcacatgagcccaggagttcaagaccaggctttaagagaccctgtctcttaaaacagataacaaatgtaaagtttataggaaagattacatcatgttgattcagcaaatattttcctctcttatttctccctttcttttctatcttcccttctacgtgaggcccttgtttatggaggaatgtcatacaagggtactcttcttgtgcatatcgagacagacctatagatgctttgagctataatattccatattcatccctgccctggaggcattagtaatctcttgagccaggcacagtgtacacacttgtagtcccatctactcaggagattgaggcaggaggattacttgaactcactgcattacagcctgagcgacatagcaagacctggcctctaaaaaaaatacataaataatctcttgagtatgctatgacatttcccaagcctgtggccttatcatataaacgtacagcattttctaattccattctgatcatttcaaataaacactttaattttatgataaaatgtcttattactgttactaaagaccataaaaagtttgtagttacaaagaagttatttgactaactcattatgttagatgtcagcctagatatcacaacctccaggaagcactccctaaccacttagatttagttgtgtttggttagttagatttagttatgtttgattagttagattcagtctaatttaatttaattaacttccgctgtgaggtcctgtaacaccctacactttccctatcataggaggcaatacagtgatacttctgcaagttcagctcagcccttggaccatacaatcctggattcaaattgcacctctacctcctagtggagtttgtcaagttacttaacctaagttcccctttccttatagatgaagtgagattaataaaacagggttatagaagagcatgtatattaagtgcctatacagtgcctgagacatcgtaaacaataaataagtactagatgctgtcatcatcaccatcaccatcaccatcaccaccatcatcacc

SEQ ID NO: 2348 - DNA, 1797 bp, Homo sapiens
cctgtaatcccagctacttgggaggctgaggcaggagaattgcttgaacccgcgaggcggaggttgcagtgagctgagatcatgccattgcactccagcctgggcaacaagagcgaaactctgtctcaaagaaaaaaaaagaaaattggttagttttctaaattgcattgaaaattttataaataatagaagcccgagagaaagccacacagcaaaactttctctctctgccaatgaaatgtattattttcagccacctctttttaaaaacaatattatcttcattcctgtacccttcattttgctttgtatttttgagagcgctggttgccttaaaatcagtatctcaaatctctggcaaagttccttctgtttctttgactctatgaccctgatattttctagaggtagctggtgtcaatttgagaagcatccagaggagtgaatagaaaagaggccttagcattaaaaagactaaatttaaatccttgttccgccacttcctaactgtgtgaccttgggcaagttaatacacatgctgagcttggattaatcagtggaggcttgtaggacacctactgtgatggcaaattctgtttgtttctagcaggagagattttaaaaagaagttaaagaaaaaaatatgtgagactatgatattctcccatattatcaaaaacacttattttcctcaatgtaggaatagtgcaagcctgtcgacccagctattttagaggctgaagtgggagcatcacatgagcccaggagttcaagaccaggctttaagagaccctgtctcttaaaacagataacaaatgtaaagtttataggaaagattacatcatgttgattcagcaaatattttcctctcttatttctccctttcttttctatcttcccttctacgtgaggcccttgtttatggaggaatgtcatacaagggtactcttcttgtgcatatcgagacagacctatagatgctttgagctataatattccatattcatccctgccctggaggcattagtaatctcttgagccaggcacagtgtacacacttgtagtcccatctactcaggagattgaggcaggaggattacttgaactcactgcattacagcctgagcgacatagcaagacctggcctctaaaaaaaatacataaataatctcttgagtatgctatgacatttcccaagcctgtggccttatcatataaacgtacagcattttctaattccattctgatcatttcaaataaacactttaattttatgataaaatggcttattactgttactaaagaccataaaaagtttgtagttacaaagaagttatttgactaactcattatgttagatgtcagcctagatatcaacctccaggaagcactccctaaccacttagatttagttgtgtttggttagttagatttagttatgtttgattagttagattcagtctaatttaatttaattaacttccgctgtgaggtcctgtaacaccctacactttccctatcataggaggcaatacagtgatacttctgcaagttcagctcagcccttggaccatacaatcctggattcaaattgcacctctacctcctagtggagtttgtcaagttacttaacctaagttcccctttccttatagatgaagtgagattaataaaacagggttatagaagagcatgtatattaagtgcctatacagtgcctgagacatcgtaaacaataaataagtactagatgctgtcatcatcaccatcaccatcaccaccatcatcaccatcacc

SEQ ID NO: 2349 - DNA, 13273 bp, Homo sapiens
agccttgctctgttgcccaggctagagtgcagcctctgcctcccgggttcaagcgattctccttcctcagcctcccgagtagctgggattacagacatgctccaccacgtccagctaatttttttattttttggtagagacggggtttcaccatgttggccaggctggtctcgaactcctgatcttaagtgatccgcctgcctcggcctcctaaagtgctggattatagcccacccaatcctatttttttaaatgctgtccattaatgcattctgacttcttgcttgaaaacccctggtttagtggataagcacctgtaactccaggaagattcaggattaagggcagaaataatgaagtaaattgaagtattagcattagtattttccattacattttggaatcgtctattttgatgtattcacgacggttaaaataatttaacatgctaatgtatggattaacttggcaattccattttaaaatattaaatggaataacgattctgactcgtaagtagacatgtgtaacagaattcaaccacatctgtaaaccatattgaaattatgagagtaagatttaccaaccacatttaggtttgacatattagatttgtgagtgaactatgtacttggattttgtcaagtaactcaatcgcttaacaaaataacaattaaatgtataaatgcagtttatagctatacattatttttaaaaatccccttcgaatgactctttaaaacataccaggggatacgctacttaagtataactaggttttggatttataacgttaatattaattattaaagcaaaactcatttctaaagagtcgcctgagtgcccaaaagacgccctcaaggacagggaagcagctgcgattcactcagcgatcaccagcgcccagaattcagggccgcccaagcggaggagcaacacgtggcccagcaaaaggagctgggtcccgtgcagcacagcaacaagaaactggcctaggaagacgctggagcgtctttctttcgcacgttactgcctgctacagtcatttaaaaaaaaaaaaccaaaaacaaaaaaaagaaataaattaatagtacgaagaaaactgcgcgagctacattcccagcagggtctgcgccagagcgcgccaggcaccgctcccgttacgggtgggaggaaaggatgcaccgcccacccggcgccggggaggctcgtccccgagtaggggacgggaacgcctgggtcccggggacgtggggcgcagggtctggggcccgaggccacggacgaagcgggaagccggctaggcagcggtctctgtctgggatggacgccgcgccccacgcggacctcccgccccgacttcacccagctctgctgcccgtaactcatatgacaagaacatcaggaaccggactattaccccgaaagggccttcccaagtcgtttcgccgcctgcagtgcccgaccgggggccgcgcgtccccggcaaccacgcccgcccgcgcagctgcagaggccggaaaaggcccgctcgcccgcgctcggcaccacccagcccgcgctccgggcgataccaccctgggcggcccctccaaaggccggagatggtgtcgtccccggcctccgattggtcgggggggcgggggcgtggcctctggagcctggttccgcgcgccggagcgcgctagccgcattgcgagccgaacccgggagctggcgccatggtgaggagtggttgcggggcgcgggcgacgcgacggtgggggtttcggcctgcgttcgggccgcagacagggcctgggcctgggcctgggcctgcgcctgcgcctgcgcctgccctgggaacgggttccggcagacgctgaggttgcgttgacgctcgcgccccggctcccgttccaggtgctgttgcacgtgctgtttgagcacgcggtcggctacgcgctgctggcgctgaaggaagtggaggagatcagtctgctgcagccgcaggtgggtgagatccgtgggctcctttggcggccccgcagaccctcatcgcgcgggtcccagcatgcacagcgcgctcccacgtggccggccgagcggttcggggcggggggacgggcctggaaagctctagatccgggggtctttaccttgacccatgggtagaatcgctctagcaattagaaataagcctcccggacgccgcccccgaacgattaaagcagaagctgggatgtggggcccaggtatcagcatattttaagagcttccaaggctgagaaccgctgcttgactgcgccgcagaggcaggagggagggaaggaaaccacttagcctctttctccccccaggtggaggagtctgtgctcaacctgggcaaattccacagcatcgttcgtctggtggccttttgtccctttgcctcatcccaggttgccttggaaaatgccaacgccgtgtctgaaggtaagtcggccaccgccaagtgtcacagagagatgtggttcctttcggtatcctctcgggcagcttgtgatagtatttgccgtccttggctggctctgagtctgataggcgtgaggcagtatttgagccatacaatgtgtaatttgaaataattgtcttcacagagctcaaggtctgggaactgtgctagaccaaactgtttaagcagacgatgtggaatgtgtgttaacgtttccttgtgggcactgtagtgacaaactattttttatttttattttttttgagatggagtctgtcccccaggctggagtgcagtggcaagatctgggctcactgcaacctctgcctccctggttcaggcgattctcctgcctcagcctcccgagtaactgggattacaggcctgtgccagccaccacacccggctaattttgtatttttggtagagacggggtttcaccatgttggccaggctagtctccatctcctgacctcgtgatccgcccgcctcgacctcccaaggtgctgaggttgcaggcgcgagcgacggtgcccggccgacaaaggggggtttcttaaagggggtcggcttaacacctacttgtgcctgaggttttgcctaaacacaatcaagtgtctggttctctgctttctgttcgattggaaagggcagttgggtaaacacaggctgagaaaaaaaggtttggttccagaaggcaaattctacgaaatactcgagggtgtgttacaagctattatttattgcccacttgtgctatcagacctgaatgcagttgttcccatggctgggccaggctttgcagtgatgacttgcgaatcaaatctgtcaatcccctgagtgcaatcactgatgtctccatgtctctgagcaatgcctgatggggagggatctaggtatgccatcccagcgtgctcggtgggaccagggtagtcagctgagggatgttagagttgatcgtccttcagcctgttagtgggaactgtgttctttcccctgaggggttgttcatgaggacctccgcctgctcttggagacccacctgccgtccaaaaagaagaaagtactcttgggagttggggatcccaagattggtgccgcaatacaggaggagttagggtacaactgccagactggaggagtcatagctgagatcctgcgaggtgagaccatcatctgttatattcctgttatcctggacattttgggggaggaggttctggaaacttggttgcttgttgtgatttctgggaaggccttcaggctgggctggtgcccgtgggtgcgggagctagctcagagccccttgttgctcaccgtcttgccctcttcttaggagttcgtctgcacttccacaatctggtgaagggtctgaccgatctgtcagcttgtaaagcacagctggggctgggacacagctattcccgtgccaaagttaagtttaatgtgaaccgggtggacaatatgatcatccagtccattagcctcctggaccagctggataaggacatcaataccttctctatgcgtgtcaggtaaagtgcaggggccacccataatactggagcctttggtctgtagttcagttaattttgagtcttgatgaggactgaccatcctgtgggtagaaccatgtgggctggggctgggtgtaggcctcctggtgcttaccacaggctgtgttcttacactgactgtatagaaagaggaggtagagtaaacctaccccatatacacctcagctcaggccctgtgcctggtctgtattgtgaatgggggaacatagaattgaggaagatttggatctttgtcccatttcctccaggcagagtaggtgtggagaaggcaaggctgtagctctatggtttttgatgaagcagctgggccagggagtgactgtggctctttgcagggagtggtacgggtatcactttccggagctggtgaagatcatcaacgacaatgccacatactgccgtcttgcccagtttattggaaaccgaagggaactgaatgaggacaagctggagaagctggaggagctgacaatggatggggccaaggctaaggctattctggatgcctcacggtcctccatgggtcagtgcagagcctggcaacctgcataaggtatggggctctaaatagctggcctcttgcattcacacttggtttttcctaggcatggacatatctgccattgacttgataaacatcgagagcttctccagtcgtgtggtgtctttatctgaataccgccagagcctacacacttacctgcgctccaagatgagccaagtagcccccagcctgtcagccctaattggggaagcggtgcgtcacaggggactcaaaaatgggagaataaggactgttgccatgtgcacctgcactgctgtatttcgtgacccaccatgtcttccctagttgtgcttgatggggaggtggggagcagggctgtcgtgcaactgggcaggtcagcagttcatttctctgactgcttccttgactctctctccaggtaggtgcacgtctcatcgcacatgctggcagcctcaccaacctggccaagtatccagcatccacagtgcagatccttggggctgaaaaggccctgttcaggtaccagtgagggcacctgcccacaatcaggtgccacttctggtgcccactgcttgttgggggatcacggtgatggctgaccagggctccctgacctatacaggcctctgctatgggggtgatggccagtcctggtgtctgagtgattcccagggcccagcaaagggaccaagtttccaggtcagcgacattggatgccttccctctgcctctgggagctatgggttggcatgcattggggtagagatccaatctggcctgaggctcactcaggacttcggggtgagaggaggggaggagctgagctgccttggctaatggggttgaaatttctgatcttaaactctccactgaatattctctcagagccctgaagacaaggggtaacactccaaaatatggactcattttccactccaccttcattggccgagcagctgccaagaacaaaggccgcatctcccgatacctggcaaacaaatgcagtattgcctcacgaatcgattgcttctctggtatgggtgggggggcgttggcaggtgtgagaaggggctgggtggctgggtggggaggcttgcaaccatagcttccacaatgatggcaatatttttcgtcaacagcagttcacctagtgagtgttgagactctgggtctgagtgaagctgagggtagagggaacacagggttggggtagtttctctctttgggctgacaggctttgtcacccacacacatccagaggtgcccacgagtgtattcggggagaagcttcgagaacaagttgaagagcgactgtccttctatgagactggagagataccacgaaagaatctggatgtcatgaaggaagcaatggttcaggtcagttgggctttgctgggtgtggagtggcatagctagctgttggaggtgatgaactgtctgagcctgaccttgtagaatggaggcaaaaaaactgatttaatgagcctgatccaataaagccagaaaggagtcctcagagcaccagaagtcttcaggcccttttagcacttttctttgaccaggcagaggaagcggctgctgagattactaggaagctggagaaacaggagaagaaacgcttaaagaaggaaaagaaacggctggctgcacttgccctcgcgtcttcagaaaacagcagtagtactccagaggagtgtgaggtcagtaggcagcacggccctggcagagatcctaggttgtaggattttcaacagcagaacaaaggatatgctgcatcaagctgtggtcttgagtccaggcttttggactgaaacaaggacctgaaacatctaaaactacctcttgattctataggaaggagataggtgctgaacttgctcaagagcccagagagctggttgtagctcacacccgttccctgggcatgtgtgttctgtcctcggctgcctcccaggagtcctcaacctggggtagtgtaaattcctgctctgcttattatcagacgtgtgtccggaggtggtcgtgtttcacagtggggatgggggcagggaggtccccaatgtgctaagctacaatcattctccctgagattttcatttagcacccagtttcttaaacagtgtttcagggccctgtctggaacttggcatgatggttctgttgcgaccagcatggtgggtgttttttaggtttttttttttaatgggctgaggtaatttctcatgacatgttttccttctaatttgggacagcctttggggtggatttctaaagttatacccacacaattaaactatcccagaaacactgggcaatgttaacgacacgcgttcccctgccttggctacttaattgctgaagatgtaatgagcactgttctcacagcctgttcccctgtccttccctttaggagatgagtgaaaaacccaaaaagaagaaaaagcaaaagccccaggaggttcctcaggagaatggaatggaagacccatctatctctttctccaaacccaagaaaaagaaatctttttccaaggaggagttgatgagtagcgatcttgaagagaccgctggcagcaccagtattcccaagaggaagaagtctacacccaaggaggaaacagttaatgaccctgaggaggcaggccacagaagtggctccaagaaaaagaggaaattctccaaagaggagccggtcagcagtgggcctgaagaggcggttggcaagagcagctccaagaagaagaaaaagttccataaagcatcccaggaagattagaatgcaaatggacattctctgggaggtggggcataccatagcccaaggtgacatttcccaccctgtgccgtgttccccaataaaaacaaattcacaagagttggttcatgttctttattgaacaccttacatgggtatggacagggcctatgggtggggcaaggcagcaatgacagcctcagtgaagtcatggcaagtagcatagccacccatgtcagaggttcgaacctgtgggggagaatcatcatcatccatgtggcctgggctccatcctaacaatccccatcaccacccaacagtctgtcccctaaggaagccggcccaaggacaacctaggctctacccagcaaggtgaccatggtccactgcttagaggcacaaggtctcttccctggtacactgcactgaagggtatggggagtgtggtccttgcaaggttggaagaaataaagggctctagctccctttagtctgcaggtgaccgatgacagacttgatgaagtcggttgtggtgctgtagccgcccatgtctcgagtccgcacctacagccaccaccggcaacagccgtggggagggagaaaagagagcccatgaagggaggtagggcaatgtgattgaggaaatggaagccaagaatgcgtgacagccagaaaaaaggcaatgcacaggaatggaaggaggagccaggatgggaagcacatggacctgccactcctcttaagccactattagctgtgctgcagccagggcaggacaggaggctgagcaggcaaagatgatgggaaacgcagatcagaggcaggatgtggctaccttccttggaagaaatagagacaagaccaggtggaaggaaagaatcacagcgaaaaggagatggggcgtgaaggtgaagctgatgcttcagcctgcctgtatcccttgctgttccacccccaaggagagctgcaagttctgcattcagatggcccatgaaaagggcagtggatggagcaggaaagagggaacagcagatgggatctaagaggcaaaagagatcaagaggatgaaacagccaagagaagggagatgaagaacagccctgagagggatgcagggatgtcagggagcagatgttctggggacctggggggaaaggagacccccattcaggttccccagagggtagtgccgaggtgctgacaccagaactactctaaatcctgaagccagcactactcttctcaactcaccttgccaactttgatcaccttcttcaccgcatctgcgatcatgctggagtgatactcaagactgtggatatggacaggaagaaactgtgactcccccaagacacctcccgctaatttccccacctgctcctcctcacgacacccaacctctgccgacagcctcccatgacctacttaagatgccgcagcatgttggaagccgacagcagcatggccgtgggattggctatattcctgcccactgcctgggcaaatgggtgccgggcaccctgtggagagaggggcaggctagacactgggaggaggcaggaggggtatgcagaggcttaggttggaaaaggacattatgggagggggagctcaggccagggtcactgaaaagaggcatggtgggcagcgtgggggaagaacaggccaagatcacttaggaagtggagatattgggatgggagaggaatggcggacttgaggtcagaggaagggccgagggagaaagcagcctcaccgtctcaaagactgcgtattctgcactatagctctcaccagggaccacaccagctcccccaaccaggccagcagccagattgtcaataatgttcccatagagattgggcatcacaagcacatcaaactggtaaggattctgcaccagctagagggtgagatgcaggcatgaagtaaattccactccccaccctcctcctccgccccatgagtagagatgtggggaggcctcacctgcatgcagcagttgtctatgatcattgtctcaaatttgattttggggtacagttcagcaacttcctcacagcactgcaggaacaacccatccccaagtttcctgtccatgggccaaaggggacagaatcagccaagaaagtacaggggctaccttcccaggaacccatcctacacaaagccatgcccctcacatgatgttggccttgtggacagcagtgaccttgccccgccccttcttggtggcatagtcaaaggcgaactttgcaatccgctgagacttggctcgtgtgacaatcttcaaacactcaatcacaccccttgcactctgggtaagaagaaagcagcagctaggtgacactgggaagggaaacaaggagctccacctctctcccatcttcatccttgccctcccccagtttctggggcctcacctcatgttccagagagctgtactccccttctgtctgctctcgaatgatcaccaggtctagattgttgtgccgagtcatatacccaggaagtgacttcacatggactacgttggcaaataagtccaacttacgcctgagggtgggcagggccatcagctctgctcctggtgccctggcacctctcaaccattcaccccacccagaccacctacctcagccgcatatcataggaggctagctcccccttatactccatcggggtatgaatctttcctgtgaaaacaaagtgggaaaaggagtgtcagccacaggccaagcccaagggaactcagaccagtgtctaacccccttaggaacatcatgtaacccagactcccatctcccattcccacatcagtaaacttttaaattgtctctgggggcaagggacaaaagagaataatgtagttaaagccagaaacatttcatctattgcattttctgtgtgtgtgtgtgtgtgtgtgtgtgcgtgtgtgagagacacagggtctcactctgtcgcccaggctggagtgcagtggcacgacctgggctcactgcaacctctgcctcccaggttcaagcaattctcctgcctcagcctccccagtagctgggattacaggcatgtgccaccacacctggctaattttttgtatttttagtagaggcagtgtctcaccatgttggccaggctggtctcaaactcctgacctcaagtgatccacccgccccggccttaatgctttatttttagtcaacatatttaatttatgttgaaacttcaaaacggagaacagattttttctatttatcaaaaaagagcctgggtttaacaacaagttgaaaaacaatgctagcagatctgtgatctttttatctgtgccttctccttatttgacattttttaacccaacacctactgatgaatatcaattatatgtcaggcaataaggataacaactaaaaccatacaactcctgcccttgagaagcaaacggtacactgggaaagacagaaaatatgaaagacatgataagtaccatgggaaacttgcatagcaacacaaagaggaaatcctctccagtaatatcaggatacagcacagaagagctggcacttcagccatgccttgagccccagaacctatgtatgtgaccttatttgggaaaagaggctttgcagatgtaattaagttaaggatcttgagaaaaaatcgtcccatccagggctaaatatttgaggagaaaaatgataccgagacagagagggaagaaaaccacagatattggagtgatgcatctacaagtcaaaaaacagcaagagccaccagaagaggcaagaaaggtttctcccctaaaccttcagagggagcagggccctgccaacaccttaatttcagactgatggcctccagcactgtgagagaatacatttctgttaatgataagccaccaggttcatggtagtgtgttacggcagctatgggaaactaatacagtgaatgagtgagaaggactctaacaggtagcaccaaagaaagaacgttctgggtggagggaacaatataagtcaggtagtacatatttggaatctaacacacaatctagtgtgattgaagcacagaacaagagttgtggaaccaaggcagaaaattaagggccaacttataaagtactgactttcctatggtaaggctgggcctggaaaatcaggctgttctttccaagaagagatatggaagatgaactataggggcagaactagaagccaaaaaaatcaaatgaggagattaaagcgcggaagacaaaagaaaaggggcagctaggcacggtggctcacgcctataatcgcagcagtttgggatgcagaggtgggtggatcacttgaggtcaagagttcgagaccagcctggccaacatggtaaaaccctctctctactaaaaatacaaaaattagcctgggcatggtggctcacacttgtaatcccagcactgtgggaggccaaggcgggcagatcacaaggtcaggagttcgagaccagcctgaccaacatggtgaaaccccatctctactaaaaatacaaaaattagccaggcatggtggcacgctcctgtaataccagccagctactcaggaggctgaggcaggagaatcacttgaacccgggaggcagaggttgcagtgagctgagatggcaacattgcactccagcctgggcgacagagcgagactctgtcttaaaacaaaacaaacacaaaaattagctgggtgtggtggtgcacacctgtagtcgcagctactcaggaggctgaggcaggagaattgcttgaaccagggacggggaggttgcagtgagccgagatcgcgccactgcactccagcctgggcgacagagcaagaagaaacaaagaggaaggaagggaggggaaaaaaaaaaaaagaaaaggggcagctaaaagtggtattccagaaatgcaatgaataagatttgatgacagttgatgtagcctcaggacagactcagaacccctggaacttttctgcatagacagctgacatgatctctcaactcctgggctcccaatgggaaggaacaaatgtccaaataccaatggtggttgccctggagttaatataattgcatagcatgtggggagaagggcttaataaacatttggtcatttgattttaaatggcacatggacaagtggcaagagggcacacataccaatgatggccactttgttctccttcatggaactcagcacctgctccagcttctcctcagatgccatattctgcacctcactcaggtggtgctcctggaactccactgggacagcggcagccttcagagacaggttcccaaaacatcacagtcaaggccaagtcctttccaacacactactgtcctctactgtctgatccccgaggccactcaccttgaacacctccttgacggcgtgcatcagctcaggccccacaccgtctcccggaagcatggtcacgggaaaggagccctccaccctcacgtcctcggcctcaattgggggaagaggggagaagtaaagatagagctggggcgggagcacggatcctgggagtagagaagtagggagacccgggaggggtggggaaaagccaggggagggagcagcgaggaagggacagggtcgtaagagagaccccagccagattcgtgcatacctggctccgcgatgcagcgtgcgccgcggccgaggtactcagacctctccatgccccagggttcccggcggagaccagcgcctgcaacagggacacacaagcctgtaaggtcagctttgagacatccagaccccgaacactacagttgactttgccctgtttaggaaaccctaggacaaactctccgctccttcgcccgcccctgcccgacatgtcccggggcctcactcgggtcagccagcggactccgctcaatgccgccatgtttcccgcaggaagtcgcgtggg

SEQ ID NO: 2350 - DNA, 133 bp, Homo sapiens
tttttttttttttttttttgagacagagtctcgctctgtcgcccaggctggagtgcggtggtgcgatctcggctcactgcaagctccgcctcctgggttcaccccattctcctgcctcagcctcccgagtagc

SEQ ID NO: 2351 - DNA, 433 bp, Homo sapiens
ccctggaagacgtactgaagatttcttcactgtggtaatcttgcgggtcttctcgttggttttctttccttcaaacttggagaatgtgagggattgggccccttggctgctctgactgctggcaaaggcctcttcttcctcccgctggagtctgcaattcaagagaggattagaatgatctagatattctccaagatttctctgtatctgaaggttattactccattaattcaggaggatctaaagattttagaactagagactaaatacgccaaatcagtctgaggtctcacatagctacaggatggacggctcttcatgcactacagatttcaaatggcatcttctcatgctcattcagcaactggtctagggttacatgaaagaaatcaagtctagtccttttccccaacaagctcagtgaaataaataa

SEQ ID NO: 2352 - DNA, 513 bp, Homo sapiens
aactaattaattttttcaaagatggtgtctcactctgctgcctaggctggaatacagtggcacaatcacagctcactgcagccactaactcctgggctcatgtaatcctcctaccttagtcttccaagtagctgggattataggtaggtacaagccactgcacccaactcgagaatggtttctttttaaagtacagactctgcactaaattgtaaatcttctttccatagtatcatgcacactgtacagaggcttttgggacacaggtttttaaaaccaccaaggagagtcagcgaatataaatgacaattatgtacttaagtaacagaaacttgattatatatatatatttactatttattatatacattaaataacctgggtttctgaagtatacacattgaataaaggaatataatggaaaaatattgacccaggagttaggaaacctgagttctcatgcacaaactcatcgttcaaccttgggtaaattagttaacctttatggacttt

SEQ ID NO: 2353 - DNA, 5881 bp, Homo sapiens
caagaaatgcaggaggccagtgaccacttgaagaaacaatttgaaactgaaagtgaagtcaagtgtaacttccggcaggaagcatcccggctcactttggaaaacagggtgagaagtcttctaacttggtgataaagactgtctgtgtgcagatgttgctgaaaggggggacatgccacctaaagcatatgattaacatctatagaccaaaagtccttccatcagagcagtctgttttcttatcccaaaagacaggtggtctctgaggttggctttgggaaggccttggggacttacaggcccgcctggggagggtgaaggaggagagacagagaggtgcaggccgtagttccccagcactatcagtgcacggcaccacccaggatggagtcactgtgctctggaacacactgaggatagcaaggcctacgtgtgagtgctttacccagcaaaactcaccccatataagtgcccatgctttcttctgggggtatggccttcctacaatttttagagtcaaaatgttcttctatgaaatgatcatgatgtcgatggaaggcttaaaaactttttaaaagtgtttaaggtcttttctgagttttaaatgcccttaccaaaatgaaatcgggtaaccttacatcaattcccagcaattattttgaaattgtgatgctgtgtggaacccagaagactgagaagtgctgaagtgacaggccactttcctaggagctgggaccctctcgggccccttcgaaacctgagagcttccagcttccaagagggtaacgcaggagggctgacgagtccagtgggtcagtgtggacatgcccacgtacccttctccctgctgacagggcccccatttccaatctcacaggaaaaccttgatagaggaaaaacatattttgagtgtcagggtttaactttgaagagtggttacatccaaaaagagaaattccaggagtttgacatttaataggaagtaacaaattccaatcagtgacacctacatgacagctgccttttctgaggtggatacaactttctcagagactggaatcctcgtgttacaacagagaagcaaccgcctgttgtccatgtgtgaggctgccttgccttgccttgcctcctgtgggcccctgggatctcaatggagtcagcggtcagggagaagctacatgggtgggtcatgtgtgtgctgcgcatgtcatcccatgtgatcctttactctgactgtccctgtgcattgtgacggatttatgagttcgttcctggtgccctggagcacagctcggtcctggcgccctcttctggagctcctccaagtgtctggctctgctccccacaggtgcgctgagctaaggagctggcaggcctgacatgctcatttcaatagctctttctgaacccggagtagcctcactgttacatagaagcagacggacacacaacaagagtatcatctctatacattagccggcggattctacccacaaatgagacctgatctgtattagtttgccagggctgctgtaacaaatgaccacaaaccaggtgctttaaaacaacagaaatgtgttctctcaattatggaggtcagaagtctgaagtcaaggtgtcagcagggcacactcctccgaagtctctaaggaaaacccttccttgcctctcccagcttctagagggctccaggcattccttggtttggaacagtgtaactccagcctctgcctctctgcacctggccttctccctgtctctgtgttcttttccatctgttataaggacacctgcattggatttacagcccaccctaaattgtagtagccacctctcatactgacccttagcttaccacagctgcaaagaccctatttccatataaaggcacattctggagtttgggttggacatgaatttcaaggtgacactgttcaaaccactatgtgatgctttgagtcaaagaaatttcttttttttttccagactcttttgtcactgaattcttattaagagattaaaaaaaaacttttagtaatcatttcactatttatcaaagaaattcaaaatcaaaactaggtactatttttgcctgtcaaattaacagagacctgggcctggcacagtggctcatgcctgtaatcccagcactttaagatgtcatggcagaagtatgacttgaggccaggagttcaaccagccagggcaacgtagtgagaccccatctctacaaggaaaactttaaaaatatatatatagtggtgcatgcctgtagctctggctactcaggaggctgaggcaagaggactgcttgagcccaggagattgaggctgcagtgagctatgatcacactactgcactccagcctggatgacagagcaaaatcctgtctctaaaaatactactactaataataataataattaatagagatcttatgctgctggagagaacatcttgaaatgggcactgtcatacatggttgctgggaatataaattggtataaactttcttgagggcttatttgaaggtatggatcatgaacctttggaaagtacattccctttgactcagtaacacaacttgtaaggttctatcctaagtaaatacttgaacatgtggacgagatttttgttcagagtgatcatcttagtgttattaatcatagagaaaaaaagcaacccaaaggagagaaatgcatacctaacaatagagcaaaggttaaattgttgtatgatataatatgacttggctgttaaaatgatggtttgagtatattatcaatgacatgggaaaacgtctgcagtataactagagaaaaatgtaggatttgaaattttgcatgtaatatgatcccaattttataaaatgtacatttaccatattgggaaaaaaggaatgaaatcaaaatgtgaagagtggtttttttctgggttatgggttgatgggtgacccattttattagatatattataagatgggcttgaattggagggaggaagctgtactgacaccgccacttctaaggtcaatagagttcctaacatgtctagccagggacacagaatggtggcagggagagaggtggccgcacagagtagaaacagcacaatgtccctcggccccaagagtccctagagggcacacagctgcagtgaccctgcatggtgggtctttctgggtcagagaagcctgaattctatatgtgtcaaatgctcagatgtggaagaacttaaacactatgtcctttataggaaatatttctaggtatccaaggactcttctggttcttgagccaaattcagcatgggcaaggccacctacttatcaggaaagaaaggcaaaaccaggcccaaatctctgaacatttctctagctccagcttctgaaatctagaaagcccattttcccacattcatatttttaaattctctatgatgggcactcctatgtaataagagcaagataaatgtagtatatgcatacaataggatattattcagccatacgaatatatgaaatgctgatacatgctacgacatggatgaattttgaaaaccttatgctaagtgaaagaagccagacacacacacaaaaaacctattctatgaatttatttatatgagatgtccagaataggcaaatccatagagacagaaagtagatgagtggttgccaggtgctggaaggtaatgagaaactagagagtgacactaaaggtcagttttatttttggagtaataaaatgttctggaattaaataatgatgattgtagcacaactctgactacactaaaaaacctttgagtttacactttaaatgggtgagttgtacggtatgcaaattgtatgtcaataaagctgttacccaaaaaaaaaaaaaatagattaaagtgcttctaagctaaatcctggtttctttttattgctgtaggatcttgaagaagaattagacatgaaagacagagtgattaaaaagctacaagatcaagtcaagacactaagcaagacaattggaaaaggtaagaaacaatacttgttttcttattcttttgagctaaggctaacatgcgctcaagtgtttattttctttctggtccaaagcttatgaaacccaaaggaatgattctcaagtggtgaggtttgtgacctagtgctgggctaacgaaaggatcctttgggtcaggaagacagctccctcccactcagatgataccagatacattcatgtactcgcaagagacatcctataattaacacattaacctcttcctctgttagctcccttttttaaaaaatgaaattgtgaacaatttttcaatttactgctttgaaattcaccttctctccctgttacatatgtaggatcagtaagtatccaaatttctattagaaaagtagagagctaagaagcagacatcctgaacatggactgcatggcacacataaagcatcctcgtgagcctctgtgaaagggaccctcctcccttcttccctccttctgcttctgtcactgaacttttctgtgttcagctcctgctcacatttctcactctttcattctttattaccttttccccttcctcccagccttactgccaaggctgtatcttgtttctttttctatattcatctctttgaagagcagctttattcttacttatccaactctcacctcaaatttgaaatgtccacaagcaaactgaggatccctttccttcagtaataaatgacaaatggcagtctgccccatgagagcagggcccaggtctgtgcttcccagcccccgctgcatccccactgctgggatgaatgaatgaaccatcattcaccaccctggctcacctttcagacttctgacctccagagctgtatgattaaacatttgtgttgttttaagcctctatgtttgtgataactttacagcagccacaggaaactaatacagctgtctcagtaaggatcatgcacattggtattttgcacaccaaatgtttcacaagtcttctttcacagtagcattggcatcttgaagacaaggcaacatcttggatttctttcctgttaccatgtgctggatacatatcaggcactcataaggctcttcaaaggataattgggccttttcagcagcagctgtactcactgatgtactcataaagaggaatcactacttggagaaattcttcaggatacaatacagtacagttttaatgtatctgaaagccacagacatttacgtgcaaaccagccagaatggggtaggagagtagtcacattgtgagacctgtgaaagctgcttttgtgtatttagctgattgtttgcctctgtctacagccaatgatgtgcactcgtcctcaggacccaaggagtaccttggaatgctgcaatacaagagagaagacgaggccaagctcattcagaacctcattcttggtagtgaaacctggaactctggatttttgctttctctttgagaacttgcatatcagtcagtgccaaagtcctgggcaggggtggtcctttttctactttttcttccactgcttcttcccccagcccagagtttctcaacctcagcactgttgacctgttaactctgtgaatggggagtaacaaaggatggagcagcatccttgacttctactcactagaaggcagcagcaacccctagtgatgacaataaaagatatctccaggtattgccgaatgtcctgtgggggccaaaactgtcctcagttgagaaccactgccctgaccttttccaaattgtaggaccagggtagaagagaaacatcacctcatttttgtgtctcagcacaggagccatcatggaagcaattgtggctctgtgctccatttgacttctgagaaattt

SEQ ID NO: 2354 - DNA, 6912 bp, Homo sapiens
tgccggctcatatcctgttcatgtgtgtgcgctacgcagactctctgaatgatgccaacatgctgaagtccctcatgaacagcaccattaatggcatcaagcaggtggttaaggtaggaaatgcctttgacattggcccctggtatcacatctatgggaatgaccagatgcccagtctttgcccatcctgagcctccattgtgtggtgagccacatgattcctcaaacaagtttgaggcccaactagtgaagggagccacactgttagggaaagataaatggatgagcatctgccataggcctcaaagccttaccggcgagactgcaacctggtagccactgccccaccactgctatccccttagggtgtaaagttatcagctgtgaggggtataggttctatctctgtaacaagggtaaatcatgagaaatgaaatggagtgaaaaattattcatctcttcccttggcaattatataattcttcttcctaaaagcacattgtgtatttttattcccagtccacaaatgaagatgaactgtgtattagttaggttagttacttagtaaagttaagctattgtagctatgagacacctgccacctccctttgcccaatatacagtgtcttaaagaagatggaggatttttctttgctgatagcggttccataatgagccatctaggttggaaggtggctctgttccacgtgatcatgaagggacccaggttccttccaacttgctgttggccattccctaagtcggtgtccttattggaatgactggacaagcaggcagccagcagtttaccactgggcaagagggaacctaccataggacacagaccatgtgtgtatggtatacatatcagaagtcaccaactgaactctttatgagcaatcatctcttcatggtgtgacaagtggataatgatcaaaagtgacaatgacaaagggcgggattttgtgaaggctaacagtaacataaagtttattgctaatttcctttccaactgaaacataatcctaaaatcattcttagcatactgattatttttcctggaaactccataagtgatcaatgagtaaataactgtatctaagcattgaagatttttttaagcagacctggatccttgcttacagggatagttgctttgtaaaaagagttctctggtaatgcttggcgcattctggaatcttgggtgtgggtagggtggttgacttagttctaagccagacctggtgctaccctgaatgtggaaattccattagccacagtggagttagtacaaaaaccttctctctctctctttttctaggaaatgaccagtttacagttatgttaaaaagtacccgtttctgggaattacaatgtactgatccatattggaagggggcaataagacataaataacactaaaataacagtgttttccatgcccctccaaaagagaagtgatgtttgatattaggatatatttgaatttttagttagggagaccctacctcatttttagtaaaatatgtgttctaaagagtaatggggaattaaattctattttaaatactctagggaaggccaggtgtggtggctcacacctgtaatcccagcactttgggaggctgaggcaggtagatcgcttgagctcacaagttcaagaccagcctgggcaacatggcaaaaccctgtttctacaaaaaagacaaaaattggccaggtgcggtggtgtgtgcctgtagtcccagctactcaggaagctgaggtgggaagatcacttgagcccggaaggcagaggttgcagtaagccaagatcacaccactgcactccagcctgggtgatagagccagaccttgtctcaaaaataaataaattaattaattaattaataaactctaggaagaaagaaatataaaaactagatttgtgagagatcagagtatggtaattctcctctccttccaaaaatatcatgaattcattatttatctggagttaggaatagaaaattcacatttgtttggtgctggatactttatagtcaccatcttcacaggagccaccacagtgtttttggaaggggctcccataaattgatgttttccctgtccatatttgcataaattgggttttcttaagacaagctggcattgtgttccagcccaggacacacagtatttgcttccccttgatgctctggaatgtttcgccaaatattcataaatcaagagatgtgtggtatgaggactataagacccctttctcaccagcatcttcagtctcaacttctctgtgtccccctccctctgcctttgcatgtgcccaggacctgcctctccccacctccagcacacagcagttacagcaatgtgcccatataccctcttcagccactattcctttccctccaccccggactgccaaagtgcttaaactagtgttctccaccaattctctttgtcactccttgcaatctggcttctaacccatcactctacagagagatcaccagtaactcctcttactaaaaccagtggtgtttctttactttttattctctctaaattgaccaaagcattagcaccatctccttgaaagcttcctcccttgtcttttaaatcccaggattttctctgttttcccctctgatcactgtagctctgccttcactgcttgttcctcttcttcctgccctgtaagtggaggccttctccccaacagtcctagtcctgagctcttgtctctccacccatttccctcaaaggctagacctccttcctctctgaggtttccctggctgctctgcctccccatcctctctcctcgtcctctgagctttggtagcacagtctacagccatcgtatgggctcttgaccacctactaaaactctgttctatcttcccagtgagagtgtgaacttaggagagcaagaagtgaaacttgcatttctcatgcattccttcaggacccacttcacacttcataatgagtgacacaacctgtacagaaacatgttacaaactgtgacctattaaataaatataagttcttataagtataatatgaattggataaaggctttagtgaataaaagaaaaactaattttggtcaaaagctacaaataaccaaacaggtaaatgctcagaggtacaagtaatcatcaagaccaattttgtcttttcttattttcctaaggaacatttagaagactttgaaatgctgtccttttggctttccaacacttgtcattttctcaattgcctgaagcagtacagcggagaagaggtagggggcgcccacctgcttgttgttttgtgctgacagccagtctataacctcctcctgagccagagctcaatagagcctctatcctctccaccaggaggccaacagcacattatctgttggactcttgggcatacaccacaggcaggagacttctggaagcagcttagattttgggcatggtactaggcctcctaggtctccattacttttaaatcaataggtagataagatgacttttaagtttccttctggctgtaagacgtttagcattatgactctaaaatacaggctttggtttaaaatgcctgtttcttcacagctgttctctctacaggaccctgactgttcctccataatctataaatatgtttcctttgccattccgactctgcttccaggaggctgatgtcatgaaagagttctccaccttcaagtactcacagagaaaaatttcattgaactaaaataacaaagtggctttcagggttttcagtgctctccaaaatggctgtaccattgcacagccccaccagcagtgtatgatgtttccagtgtctcataccttcaccaacacttggtattgacagacatttttatcctttaccagtgtcagggtataaaattatatcttgttgacttaaattgcatttatttggtcactagtgaagtcaagcataattttatatgtttattggtcatttgggtttccttttgaattgcctagtcacatccttcctttctttttcttagggttggtttttttgttactgatttgtaggaggtctttatatcatatggatagactgtagcttagcttctaattttccttatgaagtcccttgtcacacagtttttgaattttgatatgcttaaatctgtcaatcctattcttttatgatttgtgtcttaagaaattcttccctgccctgagatcatgaagatcctcttctaaacttttgtagttcatatttagagttcacaattaattatgtttttacctatccaaaattggtatgtaaggtaatgatctaatatcctcttccatatagataaccagttgtcccaatggaaggaagttaaaataaaatataacagcaatctgtctagtactatagaacaaaaggagaagtaaagaaaatccaacctctgactaaaaggaataccaaaacaggaggaggcacagactagtccgtttacaacaaactggcatctgtgagacatcagtggaagaatgttttattcagcactgttttatgatcctttctttgcccccttcagccatgtatagaatattcttttccctgtctgactgctttttcagttaccatatttttatttctaaaatttctcttgttccttttcacctctgtctcttaccacaatgtcctgttcttttttttttttctttttcttttttgagatgggggtctcactctgtcacccaggctggagtacagtggcacgatcttggctcactgcaacctttgcttcccaggttcaagcaattctcctgcctcagcctcctgagtagctgtggctacaggcatgcgccaccatgcccggttaatttttgtatttttaatagagatggggtttcaccatgttggccaggctggtcttgaactcctgacttcaagtgatccgcctgcctcggcctcgcaaagtgctggattacaggcgtaagccaccacgcccagccctataatgttctattcttaattttttctttttctttagtctctttgaacatgttaaacatattccattagttcactcaggctactataacaaaataccgcaggctgggtggcttaaacaagagatttgtttcctcacagttctggaggctaaacatctgagatcagggtgccagcatggtcacttcctggtgagggctctcttcctggcttgctgacagccactttctccatccctgtgtcctcacaggacctttcctgggtgcatgggtcaggaagagggagagagagggcaagctctctctggtgtctcttcttataaggacatcaatcttattattagatcacggccctatcctcatgacctcatttaacctcattacctccctaaaggccccatctccaaatacagccacactagggggttagggcttcaatgtatgatttttaggaagacacataaaatccataacacacactttaaaatatttcaactttgtaccctgtaaattataaggttatgaatctcatttattgtatccacttacctcttcatagcagtttgtttccttgaatgctctgcagttttgtttcattttcctatgcgcttccatgggccttctacgagcttttccatttagtctataggttccagggacaatgtttgtagggaagtgggtgggacaatgacagtgtgatagactgtgatcatacaggaaatcagtgcaatttttttcttatagaaggtacatgctaccccaagcatcatgaactcatttgatataaatcagacattaagttttaaggtaaaagagttatagtagctgattattaatttcctacatgtttgtattattctaatattttatgtttaaaattacttttaggaattcatgaagcataatagtccacagcagaataagaattgcttgaacaattttgacctttcagaatacagacagattctcagtgatgtggctatacgaatatatcatcaatttattatcataatggaaaagaatatccaaccgataataggtaagaagagaatggatgaccaaaaaatatttatagtaacattaagactttttaaaacataaacttggtatgtgtaatgtgtgattatgtgtaacattgtttaaaaagccaaggaaatataatcatgtagatatctgccttttaattctttgcttgcttataatgattccataaataatagtacgctgttggtagttttctttatataaggatgatttatcctgaaggaaaaaacttggggaaacttctactactgctatttatgtggtacttctacttcttggcgtagccaagtatttttgaaatcctaaagccccattcgaattcttgtatactttccttaatttcctgaaatttaaatactttaggctttaatgcccaggccatgatttgtcatgctaagcagctttctttcctgtgaagctgaaaaacgtgctgcttcaaacctacaagaggagctgcagccccgctggaaacagccgtccatccctaaccctgacacacaccctggtgtcccaaacccttgattcttttgctttctctatcataagtacatccactgactcttgtagaaaaatgtcccatctcctgaaacaaaccgaagagcgtcgggaacgttccgcgtgtgtctcctggcgtgtcagcacagcctccctgtctctccgcagttccgggaatgctggagtatgagagcctgcagggcatttccggcctgaagcccacaggcttccggaagcgctcctctagcatagacgacacggacggctacaccatgacctccgtcctgcaacagctgagctacttttacaccaccatgtgccagaacggcctggaccccgagcttgtgaggcaggcggtgaagcagctcttcttcttgatcggggc

SEQ ID NO: 2355 - DNA, 15714 bp, Homo sapiens
  SITE (6476): n equals a,t,g, or c
  SITE (12084): n equals a,t,g, or c
agaaattggcaaagcttcagaagcataattcagaactggaaacacagaaagaacaaatacagctgaagcttcaagagaagactgaagagttaaaaggtaaagcttggggggcacaaatccagacattcactgatttagtcactcagtaaacaatactggggttgaccagttttagaaccaggggtctctggtgtacacttagtttagtgaggcaatttttgctcacaaggaatagccatatttaagtcgtggtaactttgccctacagattcgtctgttttatttctgtcttttgtcagacagcacagcatttcctctctgtgcctcagaacctcctgggccctttgcaaagtacagatggtcggaccatgagcccggagcttttgcatcaggaaatgggtgtgtgtgtgtctgtgtgtgcgcattcgtgtgtggtggtgtcagaggtggttcagacatccgtaattttagaaaacctttacggtaatcctgatgtacagtcagagtaatgctgcagtcatgtttggtgctcaccaaagatttgcagaaaaaattctgatctgtcggagttacttagcctaagtgacacccatgtcctctgctactgtcctgccctgaatgaagaagggcagaccctggaaccagtaggtatcacttcctttagggctgtggaacagctacgcttagcctagctctacacatttgagcttttcagctcaagttcaacttgacaatacttgttgtaccccagaaaaggcaacaggcaacagagcctggtgatccctgaccagatagtttaaatcaccactctcagtgatcttgcctagggatctcttccttgagctccaacgtgggggcagcaggaacacgagggttcaggcctggggattctacacgcacctctagcccagcaaatggtggatatgatggggcccagaggagtgcagagccctgggagttcagggcggagagtgggaggagcgaatgttggtgaagagggagtaaacagcctgacaccagggcactggggcaggaaaggctgtgcaggtgctgacgaggagcaggccatgccctcctgttctaggtgctgcgtgccctccaccctgtctctgtagggctgatggtgtgggcacagaagccatgtgaatgtcagagatgaacaggagcatgtcagaggtccgggagtaaaccttgaacctgagttaggaaagggtttcctcatctccaccctttttattacagcacactcctcttgggtggttgttttggcttttttcccccctaacttcaaatagaatttcccacaagggcatttaaattctcaggaatataacctgaaaattatgtttctgagaccatgtcatgtttgggtgaataattttacatcctcttccaaaaagtccatgaaaactttcaatgtaatatttataaactgattatcctgtgcgcctcccccgacatggcaaacagtgttttgtgaatagcaccaacctttacctatgcttgtgacctaagacccagggatgctatcaaatgctgtttctcctttttgagattctaacttaacatggacataatcccattcctcttgagaagtaaatcacattcgagcagcttctttagcgcatctgcaaatggcctaagatggtaagcaccagaattaaagccaatgcttttggttaattgaaaattgaggttatataaaacgtgttggcttctaaattaaagcttgagcatttcccccagtatttcctggctgccttacaacgttctgaagcagtcattttgattcagaaacatttggcactatgttagacaaactattaaactgttggctaaaaaaaaaaagtaatttggagaattgctatcgacggtgcaccccgaggactccttctggggtggggctcagaggtgaggtagagctcaaggatgagatatcagcttagtgcaaatagggacatcaccatttgaggggctgcactgccattctcccattttgatggcccctgtggcatatgggtgtgttgggaatgtggggttgtcatagccatggaacgtcctgcccttcggcctgcagactttgtgtttgcgactcttgtatttcagtgttaacagctgccttttttgtacttcctctttcccagatagagacagacacttgattattttcttggttatcacagatgagtggttctcagctttgctgccacctcaccccccagacatttgccaatgtctggaaacaatttgggttgtcacaactggagcagaggtgctactggcttctagagggtagaagccagggttgctgctcagaatcctgcaatgcgtgggacagcccctctccacagcaaagaattatccagcccaaagtagcaatagtgccaagaccgagaaaccttgtcacaaatggatcattttcttcccaaagggtttctatttatttatttatttttttttttttttaatttttttttttttttttttgagacggagtctcgctctgtcgcccaggctggagtgcagtggcgggatctcggctcactgcaagctccacctcccgggttcacgccattctcctgcctcagcctcccaagtagctgggactacaggcgcccgccactacgcccggctaattttttgtatttttagtagagacggggtttcaccgttttagccgggatggtcttgatctcctgacctcgtgatccgcccgcctcggcctcccaaagtgctgggattacaggcgtgagccaccgcgcccggcctctatttatttttaataatattcattgtctcaaagccaatatctactttaataaataacagaccaacaaaagtactataaatgaaactatttattgataattccaatctgacaaatttgtgagaattattattttgaaaccccctcatctttatttcttgtttataaaaaatgagctatactctcattgtaagtcctgttaataataaacatcacatgattgtcctgacattctcactttcttaaacataacatgaaacaatcaaggcattgatttggcagacatatctcaaaaagcattctctttttacagaaaaaatggacaacctcaccaagcagctctttgatgatgtacaaaaggaagaacggcaaagaatgtatggaatctagtttgccttaaagctactttctttcttctgtctgtgctgttttatattttccatctcagtttgcatatagcagacacagatacaagaaagtggggtgtgactgtttttaggaagtgagattagagatttatgagagctaagttccacaatgtgtactgtcagatactgaacacattctagactagtccataaagcttctgctgggtgggtacagtggaccaccaggaattctatacttttcttttcttatactttatttgtttgctcttttttctttgtctacttccttgcttctctagtttctttgttatataattacttgcttttgtacttacttccttctctccttacttccttctctccttccttccttctctccttccttctttctctccttccttctttctttcattttctttcttttccttccttccttcctcccttccttcccttcctttccttcctttccttcctctccttttctttcttttctctttctttcttttcttttttttttactttattgctaagacagtgcaaaattcagagactaccaccaccttcaacttctaccaaatccaagaattaagattcttgcctaggaaataaacctccctcctttccttccccacctattgtccttgttagtttgtcttttatcccaaaagataaggtaagtaatggacctcacagaaattaaggcaggtgcctgaccttgtactgtaccagcccacctttcctatctcaatagcaaaccctttgctaacctccaaggactccaatctgggcttcccttctcttaaggagtcaaaggtttttagatctcaaagttggggtacatggcagggtcccggaaagagatagaacatgcttggcacatctcttttgggggctaggaagctcagggctgcctgtggtggtaggatacaaaacttccccatgcagtgagcaggacagcctgcgtctgggtgaggaagcaggattctaaagagaggagggaatatcacagaatcgctccaggagttaacaaatatatgaagtgtttcatgatcctccatcagtttttaaatatgtctaattaactcatttacctagaaaaatataattgtcgatgagtttttaatgtgaggagaagagctcggctctcggcatctgtccacgtgcagggaccacttgggagtgatcatttcaagcaggggtcttggagagccaggctgaggccaggtcattttgggctgtttgcaatcctaactgggtcagggcgaggcaggccagtgaagggattaaaactcttcaccctctctaggcccgtgttctgcctcctcattagcactcatctgtagcttggtttagtccctggtcagccaaggggggaattcctggcccctgtcaaaattctcaggaggctccaagaggcctgcagtctgtgggcaccctcctgaccagctcaggctgtgggtctaagattctttttacataagacttctgggccaggcgtactggctcacacctgtaatcccagcactttgggaggccaaggtgggcagatcacctgaggtcaggagtttgagaccaggctggccaacatggtgaaaccccgtatctactaaaaatacaaaaattggctgggcgtggtggcagatgcctgtaatcccagctacttgggaggctgaggcaggagaatcacttgaaaccgggaggcggaggtttcaatgagctgagattgcaccaccgcactcctgcctgggcgacagagtgagaccctgtctccaaaaaaaaaaaaaaaaaaggaagacttctggctgccttttcctttttcaaaggcattttactggtctcttgggagcactgcagtttttttttaaaaaacctggaaacaaagttcgttaatatctgtagaaaaaagaggttatgtgcagtgctcacacctgtaatcccagcactttgggaggccaaggcgggcagatcacctgaggtcaggagtttgagaccagtctggccaacatggcaaaaccccatctctactaaaaatacaaacattagctgggtgtggtgttgggcaccttataatcccagctactcgggaggctgaggcaggagaatcacttgaacccggggggcggaggttgcagtgagctgagatcatgccactgaagttcactccagcctgtgtaaaagagcaaaactccatctcaaaaaaaaaaaaatctataaaaaagaaatcaaacaaatttattaggaatgtggctctctttctcagagtttttccctttgtgctataaaagcaagttttaaaaggaactgaaatgacagctcagcaggtagaatcatttagtaaactcatagagctcctggcactgcttcaagggcccctgtgggctgtgttgggcttgtctaggttatgtatctcttttcaattattttcttagttaatcatcaaatttttaattgagcaaccttctagagcagttggatttacatgcacttttgggcacgtggatttgctgccatttattctagaatttttgaagggctagacccctggacatagcagatagctctattgtttaggatcaaacaaacctccagcaggatccttggaacgaggaaggagccaggacttagcagagcacgccaaggtattcgctgaaggaaactggcccttccaggggactgcatggaacccggggggttgggaatacagtgccccaaaacccagtgtgtcttttaagttcagcctccctagccagtgtgccctgtgcgtgatcactgtaaagccacacctttcaaatcaggaggtgtaagaagttgtctttaacttaagggaagaggaaacagtttgctaaaaataaggccattacctgctggaactgtcacagtaggttctaattaacttgtctcctcttgttgttttcaaaatgatgtattctaattcaaagtaaagactgtagagacaattctaaattattttcttcttttttagggggtgttgtggggagggtctcactctgtcacccagattgaagtgcagtggcacgatctcagctcactgcagcctggacctcctgggctcaagcgattcatccacctcagcctcctgggtagctgggactacaggcgtgctccaccacacctgactaatttttgtatttttagtggggacggggtctctcttgttgcccaggctagtcttgaactcctgggctcaagggatccgcctgccttggcctcccaaagtgctgggattacaggtttcagccaccatgctcagctctaaattattttcttcttttgctgcgtaggcttcttgaaaaaagttntgaactgaaaacacaagactatgagaagcagattcagtctttgaaagaagaaattaaagctctcaaggatgagaagatgcaactccaacacctggtggagggggagcacgtcacttctgatggcttgaaggcggaagtggcccgcctgagcaagcaggtcaaggtagagcggctctcacgttcagccccgccctctggttacgtcatttgattgcaattccaagttcccacagattagacagctaaaagcatctgtgtaaaggccacaggcaactggagcctgattccttcagtccttccaactgtgcacctccaggctgcctttgatttagcaatcattgtattccatattttaaaagtcaactttctaacttttttgaaattacatttatgtaaagttatttaaatatgtcgatgtagagaatactcccaaattagactgtaaattgaggtgaatccttattatataatccatcactataaatctataaacacctgcattaaagttaagttaccttattatcaaaatctttcatttaaactgttattagaaaatttactaaaacaattatccaatgcacagtgtggtgaatgtagttaataagagcatattgtacattcaaaattgctatgagtaaatcttaaatgttctcaccacaaaaaatgacaagtatttgaggtgataacatgttaatcagcttgaattattccacaatatattcataaattataacatcaataaagctataaattttcaatggtagaaatttttaagtaaatttttataaagctgagaaggaaaaatcacatagaatttttaaaactgcataatgatatataaaaatattgttacctgccgggcacggtggctcaggcctgtaatcccagcactttgggaggccaaggcaggtggatcatgaggtcaggggttctagaccagcctgaccaacatggtgaaaccctgtctctactaaaaatacaaaaattggctgggcgtggtggcaggtgcctgtaatcccagctactcaggaggctgaggcaggagaattgcttgaacctgggaggcggaggttgcagtgagccgagatcgcgccactgcactccagcctgggtgacagaccgagactccgtctcaaaaaaaaaaaaaattgttacctgtatctatcattaaaaatatataaatattcctgggcaatttaataaaatgctctagagaaaaatgaatgaatggatgaagtaatgatccatgcttggacaatcaaggcttaagtgaattgtttccctaccagaaaagttaaacctgagtgtacctacgttcttaaatgtaagacatttcatcattaagttggaaagcttttaagcttctactaaatatgtgaaatacatattagtagagtatttgtaggattatggaaatagtctctgtaattgtcatgaactagccatgcgtggtttagaagagcttttggaattgcatccgggtggccactgaattccacaactgaagtgtctgtcttttctgggccccgtcccctattgtttaaaagtaggaggtcagaccacatgatcaggaagggtcactttcattcctgtgactgcttcactcttagcagccacatgagcctgatgtcagtcagtctgtgggagtcctgtcatctggctgaggtctgaggtctgtatcttaaatgtaggaacttgtgagactgcgcttgcagagaggtaccagtaggtgtcactcacttcctctttggtagctaagactggttcactctccaatgtgatctattaagattacttggggctgggcacggtggctcaggcctgtaatcccagcactttgggagactgaggtgggcggatcacgaggtcaggagatcaagaccatcctagttaacacggtgaaggggatcctcgagatttggacagagttttgctcttgtcacccaggctggagtgcaatggcaccatcttggctcactgcaacctgcctcccaggttcaagcgattctcatgcctcagcctcccaggtagctgggattacaggcatctgccaccacacctggctaatttttttttgtatttttagtagagacagggtttcaccatgttggccaggctggtcctgaagtcctgacctcaggtgatccacccgcactagcctcccaaagtgctgagattacaggcgtgagccaccgtgcccagcctactctggttttcaaagaaaataactcatgatcatcaagttatatgtgttatagtcagtcttaaaagcctaagtaaatgcaaatctgacttggaacatttactgaaacattacaaagaaaagcatggccttcaggatttggatagtcctgagtcccccataaacctggcatgtgaccctgaacgtgccagtcagccttcagttaaatgtagctgctgtttgctaattgagaaaagatcactctacttacctcataggcctgttaggaggattaggtcttctaggtaaagtgctcagcacatatcagtttgattctcctgcttactctctgtagaaacaggggctggagcccttaaatactcagggtaactgaaaaaatatcaaggagagttattcaccttggtgtccctgaagtcctattttctcctagatacaaagcaaaagcacagacctgtgattcttattcaagctgagctcacaagggagaataaaggcagaatactgcctcttccccacaaccagagctgcccaggccacctccttcccaacagccagctaactcccagacctcctggactcaccagtctctgccactgctccacatctaagctgagctgaagccaaaacccacagttatgaaggtggcaactttgcccatgtccttgcactcaatattttattatccattaaaagagaattttagcccgtgattttacctttctcagtcttccccctgtcccaccccaccccaagcttatagtaggtatttttttttctttatgtaacagggaagttaatttttttttttttcgaggtggagttttgctcttgttccccaggctggagtgcaatggtgcagtctcagctcactaaaacctctgcctcccgggttcaagcgattctcctgcctcagcctcccaagtagctaggattacaggcgtctgccaccatgcctggctaatttttgtatttttagtagagatgggattttaccatgttggtcaggctggtctcaaactcctgaactcaggtgatccacctgcctcagcctcccaaagtgctgggattacaggtgtgagccaccatgcctggcccagggaagttaattctactgatacaacccattagatctggcattttgagtagttaagcatgcttcaaggccaagctgtgtaggcagtgatggtttaacaagattttagctaagaaagaaactgcagtgaggatgactagcatactacacgcaacgctgtatatgtggtccctttggcttatataaagcataatcgttgttttttctttacctgattccgtcattgctgtgattcagacaatctctgagttcgaaaaagagatagagctacttcaggcacagaagatagatgtggagaaacatgtgcagtcacaaaaacggcaaatgagaggtaataaaaatatgagtctcttagtccatgggtgcagactgaatttatcatagctgtgtcgctgctaaggaaacgtgtcctttggtatgaatttggttggacatatggtagattgcttagttgataggttgaatagctagttggttgaatacctggaagattggttagttggttgattggatagctggtgagttatttagctggagactgtgaagctagaaaactgggccctggaaagggaatgggaaaagataaatcatccacaaatgtaatatatacaactctgcctttccctttcagaaaagatgtcagagatcaccaaacaacttctcgaaagctatgacattgaagatgtaagaagcaggtaatcatttttgcattatcaaacattttaagacatgtaaacatgtaaaacgtgacagagatgatagattttcttatcttccttattttgcaggctctctgtggaagatctggaacatttaaatgaggatggagaactttggtttgcttatgaaggactaaagaaagcaacacggttagaaattctcctcagggatcttctttatttttcagagataataaatagactattggaaagtccaaagtttaccttacatagattgatacacaaattccttatagtagaatgactgaataaccactagaaatatttctctgagaagtaagtaagtagcttattcatgaagagcaatctctttgtgggataaaatgcctagtaaaaaaccccataacccatacagtgaaaactgattatcaaataagttagttaatgttgccagaaatatgtagatacatttaaatttaaggcatgtgctgcatttatttaaattaataaactttatttttcacagcagttttaggttcacatcaaagttgagcagaaatacagagagttcccatatatccctgccaccacacacacacaacctcccccactgtcaacttcccaaaccacagtgatgtgtttactatgactggtgaaccaacactgacacgccactgtcacctcaagtctatagtttacattagagttcactcttggtgtacattctgtaggttttgacaaatgtataatgactcgtatccacaactgtagtatcatacagaacatgttttgttttgttttgtttctgagatggagtctcgctctgttacccaggctggagtgcagtggcaagatcttggctcaccgcaacctccacctccaggtttcaagcgatttgcgtgcctcagcctcccaagtagctggaactacaggcatgcgctaccacacctggctaatttttgtatttttagtagagacgggatttcaccatgttgtctaggctggtctcaaactcctgacctcaagtgatccgcccacctcggcctcccaaaatcctgggattacaggtgtgagccactgcgtctggccagtattttttaaactattaagagtgtaaaaatataataacttctaaaattttcttcattgttaactacatattaacccccacataatgcttcctaactagctagaagattttataattaggcattcctgattctgtagcctgtaaccgtgagtgcataagtaaacttgatgtacttcgtgcacggctcttgttgtgggtcttcataactgcctcccagcagtccataaaacagaacaaaggccatgtggtttatttcttgacccctcctttaatagtgttttggagagccatttccagtctcagaaggattgctatgaaaaggagattgaagctttgaacttcaaagtggtgcatctcagtcaagaaatcaaccacctgcagaagttattcagagaagaaaatgacatcaatgaaagcatccgtcatgaagttaccaggctaacatcagagaacatggtatggtctcagccaggggccccagtcgtggccatcatactagagttgttctttgtcagtggcgtcaaattcagggggatcctctngaggcgacctgcaggctatcgcaagatggctgtgtgtgttcaccacaaggatggctgcaggcgctgtgattgtctgtgtgtgcgcgtaagtgtgtatgttttaaagcctgtatatttaaatcaagccctaaccccttggaaagtgaccacaaaattgaagggtagctcttgagacaggagtgtgtcagaaggccagtcctgctcatgcctgaaatctcaccttttttttttttttttttgagatgaagtctcactctgttgcccaggctggagtgcaatggcatgatctcagctcactgcaacctccgcctcccaggttcaagcaattctcctgcctcagcctcccgagtagctgggattacaggcgcccaccatcacggtcagctaattttgcatttttagtagagacagggtttcactatgtgggcaaggctagtctcgaactcctgacctcgtgatccgcctgcctcagcctcccaaagtggcataagccaccgtgcccggccttcaaatctcaccttttcaagggcttcctcttccatgacgtgcattcctagccactgcatttgtctcattctttcttccaactcatgcctactggcctggagaaatgctttaggaatctcctcattcaaaaagccatctctgtcttaaccccacactgctgtggccatcacccatttctttggggtcttagtcagacttacaaagaccctctaggcatacttcctccgcacacctcccattcactgcccaccaccccattctgtcgtgtgtccccaccactggctgactctgcctgcacagagctgagcactaagggttcctttgcaccctcatcttactcagtgtctcagcagcctctggcgatgctaatcttgccctctctgccttgttctcttggcttccaggacgccccgctctcccagcattcttgtcccgcctcactggctgctgctcccctacttccttactaccccctcctctccctaaactgagagtgttaggaaatctcggggctgtagcagcagttgaggaccaggggtggacacagggaacggtagtgggggacctttacatctttgtttattccttggatgaaactttaatgaggaatttgcagtgagacccaattgcacattcaaacaagtacagatgctcctcagcttaccatggggctacgtcccaataaacccatcgtatgctggaagtattgtattgtaagttgaaaatgcatataatacacctgacctaccaagcatcgtagcttagcccagcctgccttaaacgtgctcagaatgcttacattagcctgtacttgggcaaaatcatctaacacaaagcctatttttataataaagtgttgaatgtctcatgtaacttatcaaatactatactgaaagtgaaacacagaatggttgaatgggtacttgaagtatggtttctactaaatgcatatcactttcacaccatcacaaactcgaaaaatagtaagttgagccatcgtaaatcaggggctgtctgtattcttcatttagacttcagaggcctggatctcagccactcagttttaaaatgagcatgtttataaacttggggaaggaaaaaaaaccctgttttaacctaactgggggtggaggcgatggacatgtaaagaaatatacagatagggacaaaggattgagaaacttaccgggtgattccagacctccactaacagagcagtgcatgtccttgaattcaaaagtagcagtgggaccctttgagatggcttttcctgttcctagatgaggagacgatggctctgggcttggaccaaagacgctggctgccatttcttcacctaattcctccctcaactcagcataggatttctatacatgtacacatccttctctccctgtcgtagctgtgtgagaactgcttcctctgagcatactggtgtttcctgagactatataggttttgaggttaaaaaaaaatgttaatccagtctaatgtcgtggctagctcttttacacagctatctgttctgcaggctgaacaccaagatagttcagtttgcttctaagattttaaagttcatagataaaagtattttatattctaatatttctaattcttctctaaagatgatcccagactttaaacagcaaatttcagaattggagaaacagaagcaagatcttgaaatccgcctgaatgaacaagctgagaaaatgaaaggtaactgaaaccctcattaacctgcttttagaaaacggtttcctgtaccccggaaatgacattgaaatgtccttgtactcagggcttttaaactctggttctctagggggctgggcaggtaacaaatgtgagaagggggctagttgaaagatatgggaaggtatgtaggacatttaaaggaggtgcaggctgagtgcagtggcttacacctataatcccagcactttgggaagcggtgatgggtggatcatttaaggccaggagttcgagtttgagaccagtctgggcaatatgatgaaacctcatctctacaaaaaaaatttttttttttttttttgagactgagtttcgcccttgcccaggctagaatgcaatggtgcgatttcggctcactggagcctccgcctcccgggttcaagtgattctcctgccacagcctcctgagtatatcaaattacaggcacccaccaccacacccagctaatttttttttttttgtatttttagtagagatggggtttcgccatgttggccaggttggtcttgagctcctggcctcaggtgatccacctaccttggcttcccgatgttctgggattacagccgtgagctactgaacccagcccaaaaatttttttaaaataagtcaggcttggcagtatgcgcctgtagtcccagctatgtgggagactgaagtggaaggattacttgagcccgggaggtgatggctgaagtgagccgtggttgtgccactgcattccagcctgggtgacagagtgagatcctgtctctgaaaaaacatacaaaaaaataaacaggctgctgcctccaagctccactgattgttgcccagtgggaatgtgggcccagtattgctagagattcctatttttaaagaaaacccaggaatccagatttttatgtggaatatttatgtggaacaatttttaaatgatggtttaaaaatgtttaaacattgttcagaccaaataaaagttaatctctgtctggatacagtttaagacaagcttgttcaagccgcagcctataggccacatgcagcccatgacagctttcagggaggcccaatacaaattcgtaaactttcttaaaacatgagatttttttgcagttttgtttttcagctcatcagctattgttagtgttagtgtattttatatgtggcccaagacaattcttcttccaatatgggccagagaagccaaaagatcggacacccctagtttaggacctctaaaaattgaaaataataccaaacccaaatcagaatgcagtgatatgtgcccccccaaagtactgacagttcttctcattataggaaaactagaagaattgtctaatcagttacatcgcagtcaagaggaggaaggaacacaaagaaag

SEQ ID NO: 2356 - DNA, 944 bp, Homo sapiens
cggctggccggactcaggtgtttcggacgctattgcccttcgcgccagccgtcgagtgggcagcagcgggactcagccgggcgccaggttcctgccaggcagcgccgggaagcgcgggcggccgagaactccttcctgctacttcgcccagcgccgctgcttcggcttcccagcgaagtgggagaccttcctccctgtttgcagacgtccgtgggagacccttattttttccaccgctaaggttaagagattctggaatagaagcgtcgaaggagatcaagtgaaccttctacaactcctcggatgtcgccagtctccctttcggggcggaagactacgtttgagcatctcactgaggtgcaggaatggaagaacccaccttgcagcttttctgcagtgtggcttgcctgatctacccctaggaatgaagaggaggcttgtaataatccgatgaagtacagatgttgaagaggatatcgcaggacctaaacttgtgatcgtttgggggaggtcacacacgtttctgagtgggaatggatgggcgtgaatgacgtgccctcttaaaaagcacaacaatcctttaagaggagcaaaattgagttttcccattttggccaagattttgaagacagttcaatgtattctacatttgacataagatgagaactttctaaagtattctctccaagagcgtaaacgatgactaccccagccctgctgcccctctctggacgtaggataccacctctgaacctggggccgccttccttcccacatcacagggctaccttgagactttctgagaagtttattcttctccttattcttagtgccttcatcactctgtgttttggggcattctttttccttccagactcttcaaaacacaaacgctttgatttgggtttagaagatgtgttaattccacatgtagatgccggtaa

SEQ ID NO: 2357 - DNA, 972 bp, Homo sapiens
gcggccgcggcggctggccggactcaggtgtttcggacgctattgcccttcgcgccagccgtcgagtgggcagcagcgggactcagccgggcgccaggttcctgccaggcagcgccgggaagcgcgggcggccgagaactccttcctgctacttcgcccagcgccgctgcttcggcttcccagcgaagtgggagaccttcctccctgtttgcagacgtccgtgggagacccttattttttccaccgctaaggttaagagattctggaatagaagcgtcgaaggagatcaagtgaaccttctacaactcctcggatgtcgccagtctccctttcggggcggaagactacgtttgagcatctcactgaggtgcaggaatggaagaacccaccttgcagcttttctgcagtgtggcttgcctgatctacccctaggaatgaagaggaggcttgtaataatccgatgaagtacagatgttgaagaggatatcgcaggacctaaacttgtgatcgtttgggggaggtcacacacgtttctgagtgggaatggatgggcgtgaatgacgtgccctcttaaaaagcacaacagtcctttaagaggagcaaaattgagttttcccattttggccaagattttgaagacagttcaatgtattctacatttgacataagatgagaactttctaaagtattctctccaagagcgtaaacgatgactaccccagccctgctgcccctctctggacgtaggataccacctctgaacctggggccgccttccttcccacatcacagggctaccttgagactttctgagaagtttattcttctccttattcttagtgccttcatcactctgtgttttggggcattctttttccttccagactcttcaaaacacaaacgctttgatttgggtttagaagatgtgttaattccacatgtagatgccggtaaaggggctaaaaaccccgg

SEQ ID NO: 2358 - DNA, 972 bp, Homo sapiens; identical to SEQ ID NO: 2357

SEQ ID NO: 2359 - DNA, 972 bp, Homo sapiens; identical to SEQ ID NO: 2357

SEQ ID NO: 2360 - DNA, 1174 bp, Homo sapiens
ttcctttataatttttatttaattgtaaatataatgcaacagaatacggatggagaaaatcatacgtaaaaccagtatcttaacagaatagttgcaatctttttcaaatattctttttctatgtttttaagtgcatataattataattaatggatacatttgcaacttttttttttttaaacaacatgattctttaaaaactcagacttgcctttagaagagtggatatatgtaatactatgtatacagtattttcattgctggtgtaggagtgtgataactgacggtatcatcaatgactttaaaattgctggctgcatttggacatctgcaataacccctaaattgtttttactctcatgaaggaaaaatgaattttgcaaaacagacaagcaaaggaaaaggggtcttctccatcagcaatgaggtcttacttgcttaagctatacttgtcaactaggttatgtcaggtttcatgattgaaatctcttgtggttaagtctagtgttaacctaggtaatatttatttttcaagatttatataacttgctatttcattcagagttcagtatttatttcccctgaacttttcatggaaactaatgatctcaacagtaggaaaacagtgtgttcttccccgcctccccaccgccccccccactttggcttacggagtctcaacattagagacttattcttaaatttggcacattttataaagacatattgggaaggctaaaagtttcttatatctactcttcacaaatgttcaacataaatctcactagggaccgggcactccttgcttaccagtctccctgggtgaactggtgagaggtggccctcaatatttttactttttatttggtgaagcaggatcaatgacaatgacttttgtcatgtggtaggcagttagatatgcagagcttctagaaataatgcagactgggagactggaatgtagttacaagtgtgccaatgaacatgagacttttctgcttgatttttaagctaaggctgacttactctcctgacatttaagggcctcctctccaattcccagtcatcagtaaaggatgtgtacagggaatgacaatattagaacaaaaacaacctgcaagtaaatcggatgcaagagtctatgtatcttgcaaggaaatcttttgcacttaat

SEQ ID NO: 2361 - DNA, 1737 bp, Homo sapiens
ctatccaaatatctgcattcctttaaatgtgaactatttgctgtgattaaccaaaggtagattatgtcatcagtggacattttagctttatggaaacaaattattaagaaatgaatagaaaggtgtctttttctttgtgtagtgcaaaagcctaaagctatcagtcaaaggcctaagaaatccacatttgaaaaacgtaaatcatgattggtaagaatacattcatctgatagtattgagaaaagttgaaaaactgttagccttccataacacattaaacattttatgtatggatggctgaaagtattgagaaaagctgaaaaactgttagccttccataacacattaaacgttttgtgtatggatggcttaggacaataaacaacatcattaaagtaaaattatgtcagtctgttcatattaacttatttaaatcaatgaaaattttgatgagatgactaaatggatgctttggaaatgcaggattataggaggcctaaaagtgcatcttgtttcttgtaacccttttaaaaccaatatgcctggctaggtgcagtggctcatgcctgtaataccaacggggtaacacagggttatgccgtctatacaaaaaaataaatgagctgggcaagatggcatgcacctgtagtcccagctgcttggtaggctgagggggaaggattgcttgagcctgggaggtcgagactgcagtgagccaagatcacaccactgcactccagcctgggtgacagagcaagactctacctcaaaaataaaaataatcaatatagtttcaatgaagcaaagcatctcaggtaacaatttgagcataactttaaccataacttatgatagcataataacattcattagtaattcagtagccgtatgtgccaggctgtgttaggtgctttatatattgtttaatttttaaaaacttgtggagtgtacagattggtaaggtgacattgtatcacaaagctagtctttgagtccaaagttttgtggttttatgttatgatatacttttatcatggaattgtcttattaaatgttttgccagtggttcttaaagtgtgtttctgacaccagtagcattgacttcacttagaaacctgttagaaatacaaattatttggccccacccaacacttgagtcacaaactttgcagatggggctcaatctgttttaacaagcgcttcatgtaattttgatgcaggcctaagtttttgagccactgcagtatgcatttctatttttaagcaaagatcttggtctttctttttggacattgtagaaataacatgaacttgttttttgtttgtttttgttttgttttgttttaagctcctgatctttgttggttatgttgcaaaagattgtatcaggagaagcctcagcatggacattggcatcctgacataacccccattaatttagtattctttctgaaactcaaatggattctcaagtccaagagactatggaataaaatcattgtttgtctgtgttaagttttatctctgttattgcctgaagacttttggtaacaataatgcgctttcatcaaacttttaagacttgattggaaaaaataaatgtatgtttcatcagttatacaatttgttttgtatgtgttttgtatgggtggtccctgaggagcctgaatcttcaaaatatactttctgtgagctcagaaaatgaatagcacttttgagctaattgatcagtgtgga

SEQ ID NO: 2362 - DNA, 1738 bp, Homo sapiens
ctatccaaatatctgcattcctttaaaatgtgaactatttgctgtgattaaccaaaggtagattatgtcatcagtggacattttagctttatggaaacaaattattaagaaatgaatagaaaggtgtctttttctttgtgtagtgcaaaagcctaaagctatcagtcaaaggcctaagaaatccacatttgaaaaacgtaaatcatgattggtaagaatacattcatctgatagtattgagaaaagttgaaaaactgttagccttccataacacattaaacattttatgtatggatggctgaaagtattgagaaaagctgaaaaactgttagccttccataacacattaaacgttttgtgtatggatggcttaggacaataaacaacatcattaaagtaaaattatgtcagtctgttcatattaacttatttaaatcaatgaaaattttgatgagatgactaaatggatgctttggaaatgcaggattataggaggcctaaaagtgcatcttgtttcttgtaacccttttaaaaccaatatgcctggctaggtgcagtggctcatgcctgtaataccaacggggtaacacagggttatgccgtctatacaaaaaaataaatgagctgggcaagatggcatgcacctgtagtcccagctgcttggtaggctgagggggaaggattgcttgagcctgggaggtcgagactgcagtgagccaagatcacaccactgcactccagcctgggtgacagagcaagactctacctcaaaaataaaaataatcaatatagtttcaatgaagcaaagcatctcaggtaacaatttgagcataactttaaccataacttatgatagcataataacattcattagtaattcagtagccgtatgtgccaggctgtgttaggtgctttatatattgtttaatttttaaaaacttgtggagtgtacagattggtaaggtgacattgtatcacaaagctagtctttgagtccaaagttttgtggttttatgttatgatatacttttatcatggaattgtcttattaaatgttttgccagtggttcttaaagtgtgtttctgacaccagtagcattgacttcacttagaaacctgttagaaatacaaattatttggccccacccaacacttgagtcacaaactttgcagatggggctcaatctgttttaacaagcgcttcatgtaattttgatgcaggcctaagtttttgagccactgcagtatgcatttctatttttaagcaaagatcttggtctttctttttggacattgtagaaataacatgaacttgttttttgtttgtttttgttttgttttgttttaagctcctgatctttgttggttatgttgcaaaagattgtatcaggagaagcctcagcatggacattggcatcctgacataacccccattaatttagtattctttctgaaactcaaatggattctcaagtccaagagactatggaataaaatcattgtttgtctgtgttaagttttatctctgttattgcctgaagacttttggtaacaataatgcgctttcatcaaacttttaagacttgattggaaaaaataaatgtatgtttcatcagttatacaatttgttttgtatgtgttttgtatgggtggtccctgaggagcctgaatcttcaaaatatactttctgtgagctcagaaaatgaatagcacttttgagctaattgatcagtgtgga

SEQ ID NO: 2363 - DNA, 584 bp, Homo sapiens
ctagaactctaaatcttctcagtaatgtcatacaagtctaacaagaggaaaagcatccttaagtcagtctatttagataaactcttcaagtccctatataaggacgtattccactagcaagccagtaaatttttccaaggtcacataatcttacatgaaatggaacctttcatcttagacttcatcaaactcaattttttcccttctagattcactttgtgtttatgcatgcatgcacgcgtgcacacaattctatcagcagctgtaaactacccacatattttcttaatctcattttttcagtttttcttcatctttaaaagaggttacatttcattcctggtcaactcttaaaaagaattatgtaatgttgggccttcatattaaagagagagactggttataagatcctttacagtccattcattttattctgatgtctaaccagatagacactagcaagcaaaacttccctcttaatcctggaccaaatgcataattttactgtcactttcaaaaatctgttatgactgaatcaaaatccttttaaagaaaggaaaaagctccttttgtgtcaaatagtt

SEQ ID NO: 2364 - DNA, 774 bp, Homo sapiens
tccatttaagttcatataatataatctacagtttagatacttggacatatatcctgcccaaggcactaagtgtaatataggaaaaggatagaaagccattttctctatcttcaaaataatgtgccatctccgttaaaattaagactttaaagttctataattttttctttgtattcaactttttaatacctccaaattacaaacatctatttttttcactacatagatatataattacactatgatagacagaattctagagtgattctcaataatccatgccttggtataatcctctcccccattgagtgtgggtgggacatgtaacctgcttctaaccaacagaatatggcaaaagtgatgggatcatctctcccatattatgttatgttatataacaaaagtgaagagaagttgcagatatacataaggtttctaatcagctgactttgagttaatcaaagagatcccctgggtgggcctgacctaatcagactagtcctttaaaagagagtgaaccagtcagagactctctctcctattagccttaaataagcaagctgccatgagctctacggctgcaaggaaataagttttgtgaacaaccatgtgatcttggaagaagcatctgaacctcagataaaagcccagccccagccaacgccttgcttgcagctttgtgaaactctgagcagaggacccagctaaatcacgtttggactcctgacccacagaaactttcagataataaatgtatgctgttttaaatctaaa

SEQ ID NO: 2365 - DNA, 774 bp, Homo sapiens; identical to SEQ ID NO: 2364

SEQ ID NO: 2366 - DNA, 255 bp, Homo sapiens
ggacaaacaaggagcaaatggtcagtagggtgaaccacgctacaaatgcaaaagagggagaaggaacatggtccatttgcaaaacgtaagcttttccctagggttgaaacataaggggtgtatggaaaatggttcagagtcatgctgaaaaggcctgcaggaccacaggatttaggacttggttccatgccaagggtctaaactttttccttaacatgatgaggcattaatttgtgtggcagcaataaagataaa

SEQ ID NO: 2367 - DNA, 255 bp, Homo sapiens; identical to SEQ ID NO: 2366

SEQ ID NO: 2368 - DNA, 544 bp, Homo sapiens
gtctttaaggccaaggatgagaagaatgcagaagaatggctccagtgcatcaacgtggcagttgcccaagccaaagaaagggaaagtagagaagtaaccacatatctgtagggatttataagtcagccatgacaattatacaccacaggcattgtattatcattgccaatgtcaagaaaaagagctaaatttaccaagccatgttgttttttactaaataccaatggaattgttgtcctttaagaagaagggcctaaaatggcaggattcttagtaaatgtcatactctaacagctttagtattgacttcagaatatatctgatgcccacaaaaataaaataaaataaaaggagctacagagtatgccctcagatagtgtggggccaggaagggaaaagtcactgataaaagaacttctgtagatatgtcatttaaaactgtgagaaaacaacatgaaaagatgcctgaactctccatcctgaggaaagattagcacttctgatgaaaatcacagtctgtcaaaggtattaaaagaaaacttta

SEQ ID NO: 2369 - DNA, 544 bp, Homo sapiens; identical to SEQ ID NO: 2368

SEQ ID NO: 2370 - DNA, 165 bp, Homo sapiens
taaggttgtaacaagaggcgtatttgcacacaataaccaccgtgaataggtctaaagtaaaacataagaaatatttggggtttagtctgctttttaatccatattactggatttttgttaagccgtttaacggcgttccaggggcaggaaaaaaggatattcagg

SEQ ID NO: 2371 - DNA, 510 bp, Homo sapiens
aattgtgtgagttagctaccataaagaaatccaagttaggtttccttttatgagtctaaaaatcacaggaaaacatctgaaaaggtatatagcatttttctcaagggtaactacttgctgttaatgtgattgcaggacagtgtgcagttaaaagacctgtggaaaaaaatctgccatcacagcagtggaatggagtttcaggatcaccgctactggttgagaacgcatcccaactgcattgtaggaaaggaattagtcaactggctaatccgaaatgggcatattgccacaaggtattctgatcttagaaggtttcaatattatttgtttattttgaatgagaaaacatatttgaagatagtaagagttacagatttctttgtagagttagggtgctctttgttttatgtaattgatggtttagggtgctaattacttaaccctcctccaatctgagttttaaccagcagagaacagatgcaaggagtacaaggagccaaataggatctt

SEQ ID NO: 2372 - DNA, 3941 bp, Homo sapiens
agatcagccagcattactaacctgtcactggatagatctggttctcctatggtaccttcatatgagacatctgtcagtccccaggctaaccgaacatatgttaggacagagaccactgaggatgaacgcaaaattcttctggtactggtccagtatctttgacccattgctagttttgagcatagagaatgttcatgtgactgagtctttttttttctttttgagacacggtcttggtgtgctgcccaggctggggtgcagtggtgtgatcttggctccctgcaacctctgcctctcagattcaagcgattctggtgccttagtctcctgagtagctgggattacaggcgcatgccactacacctaattttttgtatttttagtagagacatggtttcgccctgttggctaggctggtctcaaactcctgacctcaagtgatctgcccgccttggctcccagagtgctgggattacaggtgtgagccactgcacccagcctgtcactgagtctttttaataagaaatatataagtgaaatagcatatcagttaaacagaagtgcttagcttcagttttactaggatcacctgagagatgggtcaagtattctatactcattgcattaatattttcttttctttctttctttattattattattttttttggagatggagtctcgctctgtcaccaggctggagtgcagtggccaatctcggctcactgcaacctccgcctcccaggttccagcgattctcctgcctcagcctcctgagtagctgggactacaggcatgtgcaccacactgagctaatttttgtatttttagtagagacggggtttcacagtgttggtcaggatggtctcaatctcctgacctcgtgatctccctgccttggcctcacaaagtgctgggattacaggcgtgcgaccgcgcctggccagtattttctttacccttttatctggtaaaatcagaattcagttacctatgtaataagagagcttaactcttagatcccatattgctatttaagctttgaagcatgtttgttatacacatgtaacacttttcagacatttaatactatatgtttatatgaaataatcagttgcttattgaatttatctgtgcataaaatactgtgttcaattctaagagtgactcagagaaatggaaggtatggctgtgtcctcaagcttataattcaaaagtagaaataagagccaggtgtggtggcatgcacgtgtagtcccagctacttgggaggctagggtgagaggactcttgaggccaggggtttgaggctgtagggtgctgtgatcatggctgtgaatagccactgcactccagcctgggcaacatagcaagaccttgtctctaagacaacaaacaaaccagcaaacccacaaaaggtagaaataagatcagtgggaagatccttaatagtggaagtagtaatactttaataataaaaaagtgtcaaataaataaatgactatatgtcatgtaagaattcaaaaaaacagaaagctcattactaatgagggaatcagaaaaaggcttaaactgaaggacttgaactggaccttgagagatggaatcattttggataggcagtgaggaaggtgaatcttatttaaaggtgtgaagaaagatacagaggtgagaataagcatgacattttccatggccagaagtaggattttttaattgggagagagtttaagtaggagtctgggggcaatgagaaaggaaagttatttgggactacctggtggaaggcaatgaattctgtacttacaggtgtagatttgaaactttagttgctgaggaacattcagaatttttttgagcagggagtaatttactgaagctcttctttttaaaaaactcatctgtcagttgggtacacagtgagaatctggtggagtgaaagcctctaggaacagttaccttaggttagtgtgattaactgttgtctccctctgccttgccccatctccaaagaagaatacataaataggagattgataatatgtgccattgactgaaaaaagaagtatttggaatagttggttttcaagagaaaaagttatgtttggaattagatgagcagagttcaagctgttcccacgtatatgacatttgtattaaattgtgtgagttagctaccataaagaaatccaagttaggtttccttttatgagtctaaaaatcacaggaaaacatctgaaaaggtatatagcatttttctcaagggtaactacttgctgttaatgtgattgcaggacagtgtgcagttaaaagacctgtggaaaaaaatctgccatcacagcagtggaatggagtttcaggatcaccgctactggttgagaacgcatcccaactgcattgtaggaaaggaattagtcaactggctaatccgaaatgggcatattgccacaaggtattctgatcttagaaggtttcaatattatttgtttattttgaatgagaaaacatatttgaagatagtaagagttacagatttctttgtagagttagggtgctctttgttttatgtaattgatggtttagggtgctaattacttaaccctcctccaatctgagttttaaccagcagagaacagatgcaaggagtacaaggagccaaataggatcttaatttaccttattaaaagcagaagaactctctagcaaaggaggattagagaaggtagctggaacctaaggccaaagaattccccagctactgttcactaatctagacaggttgtaacctgtgttgagtatttgatccataagctatgcctgtcgggtcctagcttgcctcacaaatcatttataaaaaagagtaacagacaggtcctgcttttcaaatacatgtatcccctagcttttactattttctcagattagctactcctcctctcatgggaagaaaaaggtacgtaatgaagtaaagagagaaatagctttaagcagtaaagccctggttgcaattttggctgtatatattttttagctttgtgcttttagtcacattattcaatctctgagacttcttcaccatgaggaaaattgtgtggtcctgtgaataaactgtgggggatgaaataatagtggctgaagtgctttataaattgtgaaatgccatataatgtatggtgtcattaagtgtctatttcatatatatatatacacacacacacattttatggctgtatctgtaatatttggtattgtcttattaaaactaagctccttgaaggtaggagcttttctcaacattttaaaatctgttaagtatagggttgtgcgtgcattgaatactcagtcaatgcttgctgttattaaaattaggttttgttgggactgccttaccagtagtttcttctcctttactatagtacctggaagaatcttttagtttgctttaactctctcgtttcgtcctttacttatccaagggccatttgaaattctaactctgattagaactgaaaaaaaatattttaaggttgtgtcttatctggtacttaactattctgactgacttttaaaacttttcatttttgtgggtcttgattcagggcacaagctatagcaattggacaagcaatggttgatggacgttggctggattgtgttagtcatcacgaccagcttttcagagatgagtatgcgctgtatagaccactgcaggtacttttcagtgtttactgccaattagaatgtagcaagcttattttatagtctttcttcatcagtgggaataaaaagtagtttattagaagatgatttttctaacattttttcctgctgtttgaggaaagttaaaactttttttacttggtaggcagcagtgatgaaaaagctgccattagaatcaaacattttattgtttactttaaatttgatcagacaataaaaaa

SEQ ID NO: 2373 - DNA, 126 bp, Homo sapiens
gagatggagtctcgctctgtcaccaggctggagtgcagtggcgcaatctcggctcactgcaacctccgcctcccaggttccagcgattctcctgcctcagcctcctgagtagctgggactacaggc

SEQ ID NO: 2374 - DNA, 484 bp, Homo sapiens
tctagatagaagccaactaaatttctagttaccctttcttttaaataaattaaagtttccttgatgctattggtattccacttctaagtcatttgtttggtaactttaccaagagtcaaaattaaggatatgtatgaatactgatattatgagagagaacaaatttcttgtaatttttctactgacaaaatagcataatgtaataatatttgaggacaatattttaaatataggtctactagtgagaagaaaggaattctttttttggtcataacattttgcttatttgggcgtcaaaattggtgttcccttcatcagattgattgcattgcagatatttaactataaaaccttcttagttcatgggctatacagaaagaggaagaaggctagatttggcctgtgggccatagtttcctgactctgatctgcaagattatttctgcatttaatttcattctttatatttgttattaaaaaaaaa

SEQ ID NO: 2375 - DNA, 108 bp, Homo sapiens
atcccagcactttgggaggctgaggtgggtgcatcacctgaggtcaggagatcgagaccatcctggctaacatggtgaaatcccgtctctactaaaaatacaaaaaaa

SEQ ID NO: 2376 - DNA, 1464 bp, Homo sapiens
agtataaaactagaagcagggtaggtgattttatatgacaaaatatgaaacaatgactatgacaggcattatggcattttcatatgtttatatttttactacttagcaaaaaaatacttagaacttctctagtaactcctgagttgtagattttattttctcattgaagctggaaaaaagtagtcccaaaacctaaattcaaaataaaactatgcaacataatttttgagttgacaactaggcttgatttagagaaagtaaacatattttcacctctatcattattcttttgaatttcttatgagatcgagaatgaaaatgtataatggtacaatattcttcatgttataaactctttctctactgtacagaaatatatcttataactatatgtcactttacagtatttaaaaatagtttcacataatctcctttgatatatgaaagcacaaaatattagaaatgttctagactaatcaagcgatataacatctatttgccatgaaatgcaagttagtattttatcaatagccaatatttagtatccttgcactccacagtacaacaataaagattatatatttgtaaagattcagtaatatttttagctatttggtcatgcttcactgcattttttataacagcttctcaatgaatttctgcaagcatatcgtagtttttaaaattacaaaacataggagtcaaacccagagcactgtttcatatataagacacacataaatacatatctatagatcttatttaaaaaactaatatacaaagcattaatagaaaaaaattctagacactcaatgtttatctccaaaaggaatgatatccttttacttgttctccactgaatgattatctaagttatttagggattaaatgtaagaaacatactattatatatgaatatgcatttaaaaacaccatagtgggaaaaggccactatttaagatggatgccaggaagtgtttctcttgagactaaatattctcgaatttaatgttacaatctaatcaaaatccctaagtaggaagaatattctaaaagttaagttgctaaatgaaatgtttttactcataagggctctaatatacaatttctaagtaattcaaattacattcattgattttagtatctggtaactttattaatatcataatatctggtcacaatcttttactattatgcatttagaaagttgtctgaatactttatcatgtatataaaattggtaagttattttgaattaaattatttgtgttctacaattcagcctaatttgacaatcgcttctcatcctctaaaccctgtagaactatttactgagctctacggagacacagctacaagcaccacgtaagagtgtccatgtttttcttgcatgtaaaacagaaattgaaatgcaaaagcagattgccaaatcctaatactcacagaacactaggaaagcaaaaa

SEQ ID NO: 2377 - DNA, 1563 bp, Homo sapiens
agtataaaactagaagcagggtaggtgattttatatgacaaaatatgaaacaatgactatgacaggcattatggcattttcatatgtttatatttttactacttagcaaaaaaatacttagaacttctctagtaactcctgagttgtagattttattttctcattgaagctggaaaaaagtagtcccaaaacctaaattcaaaataaaactatgcaacataatttttgagttgacaactaggcttgatttagagaaagtaaacatattttcacctctatcattattcttttgaatttcttatgagatcgagaatgaaaatgtataatggtacaatattcttcatgttataaactctttctctactgtacagaaatatatcttataactatatgtcactttacagtatttaaaaatagtttcacataatctcctttgatatatgaaagcacaaaatattagaaatgttctagactaatcaagcgatataacatctatttgccatgaaatgcaagttagtattttatcaatagccaatatttagtatccttgcactccacagtacaacaataaagattatatatttgtaaagattcagtaatatttttagctatttggtcatgcttcactgcattttttataacagcttctcaatgaatttctgcaagcatatcgtagtttttaaaattacaaaacataggagtcaaacccagagcactgtttcatatataagacacacataaatacatatctatagatcttatttaaaaaactaatatacaaagcattaatagaaaaaaattctagacactcaatgtttatctccaaaaggaatgatatccttttacttgttctccactgaatgattatctaagttatttagggattaaatgtaagaaacatactattatatatgaatatgcatttaaaaacaccatagtgggaaaaggccactatttaagatggatgccaggaagtgtttctcttgagactaaatattctcgaatttaatgttacaatctaatcaaaatccctaagtaggaagaatattctaaaagttaagttgctaaatgaaatgtttttactcataagggctctaatatacaatttctaagtaattcaaattacattcattgattttagtatctggtaactttattaatatcataatatctggtcacaatcttttactattatgcatttagaaagttgtctgaatactttatcatgtatataaaattggtaagttattttgaattaaattatttgtgttctacaattcagcctaatttgacaatcgcttctcatcctctaaaccctgtagaactatttactgagctctacggagacacagctacaagcaccacgtaagagtgtccatgtttttcttgcatgtaaaacagaaattgaaatgcaaaagcagattgccaaatcctaatactcacagaacactaggaaagcaaaaactggcatattatgggaactaaaaatgagaaagtgttccatactatacttattggaacacaatgtacaacaaaagtgctactgagattcatataaaaaat

SEQ ID NO: 2378 - DNA, 277 bp, Homo sapiens
atagaaatcttcaaaaacattcctacaacagaggatcgccactcaccccaaacagacattaaagactggtagatgtagttacaatcaagcaagatcaagaatatcctttgtatcttagattagaaaacaaagctttagaagagcctcaattatagtttaaaaaatgcgtgattactcagtatggatgactactcaaccataactctattataaacttgaaaatttaatattaaaacaattaaccaaatattctccccccattggttaacccaatttt

SEQ ID NO: 2379 - DNA, 277 bp, Homo sapiens; identical to SEQ ID NO: 2378

SEQ ID NO: 2380 - DNA, 1285 bp, Homo sapiens
tttcatctattcattgctttaactatatttgtatatatgctttgaagttcttatcacagtgttttttgatttgtaataataattagtaataatatagaaacaaaattaattgttcttaaccagtgctatgtaacctattaagtgcttactagagttgcatatatggacttttaaatttgttctcaattttgaagtttgataacttagagatgtacaaaactatactttttaaaaaacacgtttgggctaagcaacattactaatttcgtaatccatagaacactgacatattcatggtttaagggactactgtcttgttcacagtgcaagaggcatgccttttaaaaaggaatttcttattttttaattcttcagtcatttacattcagaatcaaccatcaaatttatatggaacagccatagagagcaaaattcttgtcttgaacttttcaatcaaatttgtttttaagcacttaattctgaaaacagttattaatttaaacaaagcaaaatcttgaagtcatacaattagaagtcccactctgttccatgtagatttcaatatagatcatcctaatgtgtatagtggtcccttgatatctgtagggggttggttccaggaccctctgcagttaccaaaatctaggaatgctcaagtcccttatgtaaaatactttaaatcatctctaaattacttacaatacctaatacatacaatataaatgctatgtcaatagttgttatactgtattgtttagagaataatgacaaataaaaggactgcacatatttagtagagatgtaaccatccattttttccaacaaatattttcaatctgcggttggttgaatccacagatgctggacccctgaatatggagggccaactacactagaaacacacacgctagctgagaaagatggtggcttaagggtaagcatggaaagaggcaaggaggtgaggacagcaggactgatagataagctggggaggccagagctccacaaggacatccatttcacttatcagaatctaaaaataaacacgttgagatactagaatcaaagaatccaaattagtttctgaacacatttgaaaagatcaaactcttacagttaaaaaaaaaattaatcagccagacatggtggctcatgcctgtaatcccagcactttgggaggccgaggcgggtggatcatgaggtcaggagtttgagaccagcctgaccaacatggtgaaaccccgtctctactaaaaatacaaaaattagccaggcgtgggggcac

SEQ ID NO: 2381 - DNA, 697 bp, Homo sapiens
cttctttaaagagacagtcaccaaatacttggtttaactcgactattgacttgggcattgagagagatgatatatacatctttggaaagtgaagtcaatgttcaagaggtgatagaagctttactttttagtgatcagaaatatttagtgcatcttttcagacaggaagaattttatcatcaagtattcccttataaaaccaagtaacacttctttatcagtaacttttagaacttaaaagaaagcaaaaagtaaatggaattgtaggcaatttatgaatcctagtagattttacaatatgtaatttatgttgtttacagtatataaacactaagttttgtgttaaatgtgatcaggaataaaagtatcccacaggcatctgacacaaattccagaattagccaaagaattgtttatttgaggccaggcaatcccagcattttgggaagccaagttgggcagatcacgaagtcaggagttcgaaatcagcctgaccaacatggtgaaacctcttctctactaaaaatacaaaattagccgggcatggtggcacatgcctataatctcagctactcaggaggctgaggcaggaggatcgcttgaacccgggaggcagaggttgcagtgagccaagattgcgccactgcactccagcctgggcaacagagtgagactctgtctcaaaaaaaaaaaaaaa

SEQ ID NO: 2382 - DNA, 396 bp, Homo sapiens
ctgacattttacattaaaataatgtgaaacatcagaattatgttttaacaactttaaaattaagatgatgttaaaataattttagagttatgctatggaaaaattctatcatgaaattatttttctctagatagcacaataccaattttaattaatttcttccaattaggttacttttctttaataaagttatgctgccttcagttttccaatggcaagtagacaggatatgttcaaggttttctgcactgtaggcacagtctctcaagcatatcctgatcatgtaatgactgcataaactccatcaacctaaggtgatacttgtaaataatttatttttaagggatggtgactttaaaaattattaatgaactttgagaagttttaagagtgctt

SEQ ID NO: 2383 - DNA, 284 bp, Homo sapiens
ttcagcagtagggaatttctccaattacattcatgttgaatgaatttttatttatatatagcttacccttccaaaataaaagtgtttttttaatgttgttttgttttgttttgtttttttccttttttgagacggagtttcactcttgttgcccagactggagtgcagtggcacaatctcagctcattgcaacctctgcctcctgggttcaagtgattctgctgcctcagcctcctgagtggttgggattacaggcatccaccaccaggcccagctaatttttt

SEQ ID NO: 2384 - DNA, 1971 bp, Homo sapiens
cagggcccaaatgacttcactgacacctgtttccaggagggggtcttcagagcctccttaggctcttgtcagtatcataaataattcctcttcttatagcggatggggttaccaaaaaaaataaaaagtagggaagagcttctccatgggatcagatcacagctttggggagtgggatggggcctctatgctttgatctatgcatgagctggggtgagaagttcccacctgcacctgactgcaatgactgtaatggctggaattgtcacctcttctccctgataggctcttcctcacctggaggatcggggctggtgggagggcagggaaggggaggccatcagccagaatgtattttctttcagttccatttcctgaggaagaacttgcttttaaaggaggaaagggacagaatcagacctaaataaaattcctgagtatgcaatatttctctttagtgtctcttcacctccctttctgagtttctttcctacatcctggctcttcattttcccaatgcccaatataatcatggttgctgaaattctcactgccttctactttcctttccccatcaattaacccactacaaaatgacccctttcatttctcgcttaagcatacatggtgggtcatttaactaagtgttaggaagaaaacaatttaaagacactaattttacagtttgcgttctgtaaaaggatacttgctggataatctaagtgaattgatggattaggtcatttgggattgtgatatatattgttcttgctgacaagaaatgacccatgaatgtctagatctatcctgtccaatattgtagctacatgtggctatctaaatttaaatgtaatttaattaagccaggcataatggcacaagcctgtaattccggtgactcaggaggcttaggagggaagatggcttcaggccaggagtttgagaccagcctcggcaacatagtgagaccctgtctctgaaaaaaaatttttttaactagctaggcatggtggcatgcgcctgtagtcccagctattctgaaggctgaggtgggaggattgcttgagaccaggagttcaaggctgcagtgagccatgatcatgctactgccctccagcctgggcagcagagcaagacccctactctttaaaaaaattaatttaattagaaactccatttctcagttgcactaactacatttcaagtgttcagtaaccatagtggacagtgcagatgtagaaaatttccatcactgcaaaaattctattggacagcactggtgcagatcattgctactcaaaatgtgatccatgggccagcagcatcaatattacctgggagcttacagaaatgcagaatttcaggcccactgcagatctaccgaatcaaaatcttcctttagcaaaatttctcaaacgattagcactggcctacatccattttatccttccttagctattagggatgtgaggtccgagggcttcaaaaggtccccggaatagcttgttccttcatccactgtgtcctattcattcttcagctaactccagcaatgagctgaaactcattcatcacccttgctgagttttcttctcaatccttattcctaattctggttctagatgagccctacctacccagtggttgtatttttgtagccagtgtgggacacaggagattggcagaccaacacagctagcctctctctagccctccctccacctctaagtcactaacaatccatgtttgttcagtttgttgacatgtggcatgttcatttgttcacaacttaatcacgggggacatttcagaaaaatgtgtactaagttaaaaccatgtttagtctcctacaacttgtacattttcattttctcttatcagtagattgtccttgttgacatagctcatgcatgaggacacatagcagtacacacacattgaatgaattgttagtcatgcaaaaaaagaaaa

SEQ ID NO: 2385 - DNA, 1971 bp, Homo sapiens; identical to SEQ ID NO: 2384

SEQ ID NO: 2386 - DNA, 1971 bp, Homo sapiens; identical to SEQ ID NO: 2384

SEQ ID NO: 2387 - DNA, 413 bp, Homo sapiens
tgcatgtcacatctaatactgtaacactttaaatagctttcatgtcagttttaatgttaatgggatttaatttattactaaagtacatttttgttggttaagggcactgcacttttctgttttttaatgtgggattttgcgtaaatattctgtacctaagactttgtgaaagtgtgtctgtgccataatcaacaaatgatatacatcacatgcaagtcaattttatttcaatctatcataagcagtaggcgtgcacgttaagaaaattctctggatattttcataaaattacatgctcccttacctgacaaaacttgttacagctttccaaaccaaaatttccacattttgtttctaatttttaatttcaatttaataattatttaatattctatttgaatttataatatagt

SEQ ID NO: 2388 - DNA, 1252 bp, Homo sapiens
tggaacttatttttaacaggaatcaaggaagaaaatattcatgcagagctatgacttagaaagttataggggctgccactatacagcacttctaaagtaaaacatcttctatctccaactgggctgtcaacatagtggactttcatgttctatggatatgaattctttaaggatatagcccttaattaagctgtaaaaacaatgcatctctcaaccttgacatttaggatctctcctgtctgccccctctacgccccactccaattaactcatcctacatctctcagatgtaagttggataagagtgggtttgaagtttggtaatacaagtggcagttttaaaacaccaaattctttagatcagctgaaaagaagagtgagaattgaaaattcctccactagtaattgttagccaatagaatagcctcccagagcagtccccacagcacttggttgccatgggtttctctcctctcactgcctgccccagtgccatgatgtctggggcttgtctcttctatggcatcccctgattgacttttgtatagcaacctctgtgtcaagtcagtaatatgatgccattgtaataggaggccttcctaaagaagtaactgcaacttttaaaacgtgatgattattggtttttataatacacaaagcattaattttttcttatcttattttctctttattatttctttccaacttttgtttggagacatttatgttagaagaaaaactataaagttttatcattgtagagaacagagagatcaaagacagctggactgtacctgtttgtgtaattatttctgatatttttaggaaaagaagtttaacagagtaactcagactgagactgttaaactctgttcatgataaactccatattacataatataggtgaacagattaattccctccatgtaactaagatactctatttacattatttatatactctcttagttttttatgcacttccaagttttagttggaaaaatgaaaaccaagctactacttaaaagttattaaaaacttcacataaaatatttcattttagctacaagttattcattgcataggattttataaatagtctgggtatttcataggaactgcatttcaaaagtgaattaaccaaacctaaaaaaagggttacttttaaaatgcattaaaataaagaagtttcatattcagttgataaggccattaaggtaggataatgcagttacatatacaaactaaaaaa

SEQ ID NO: 2389 - DNA, 1252 bp, Homo sapiens
tggaacttatttttaacaggaatcaaggaagaaaatattcatgcagagctatgacttagaaagttataggggctgccactatacagcacttctaaagtaaaacatcttctatctccaactgggctgtcaacatagtggactttcatgttctatggatatgaattctttaaggatgtagcccttaattaagctgtaaaaacaatgcatctctcaaccttgacatttaggatctctcctgtctgccccctctacgccccactccaattaactcatcctacatctctcagatgtaagttggataagagtgggtttgaagtttggtaatacaagtggcagttttaaaacaccaaattctttagatcagctgaaaagaagagtgagaattgaaaattcctccactagtaattgttagccaatagaatagcctcccagagcagtccccacagcacttggttgccatgggtttctctcctctcactgcctgccccagtgccatgatgtctggggcttgtctcttctatggcatcccctgattgacttttgtatagcaacctctgtgtcaagtcagtaatatgatgccattgtaataggaggccttcctaaagaagtaactgcaacttttaaaacgtgatgattattggtttttataatacacaaagcattaattttttcttatcttattttctctttattatttctttccaacttttgtttggagacatttatgttagaagaaaaactataaagttttatcattgtagagaacagagagatcaaagacagctggactgtacctgtttgtgtaattatttctgatatttttaggaaaagaagtttaacagagtaactcagactgagactgttaaactctgttcatgataaactccatattacataatataggtgaacagattaattccctccatgtaactaagatactctatttacattatttatatactctcttagttttttatgcacttccaagttttagttggaaaaatgaaaaccaagctactacttaaaagttattaaaaacttcacataaaatatttcattttagctacaagttattcattgcataggattttataaatagtctgggtatttcataggaactgcatttcaaaagtgaattaaccaaacctaaaaaaagggttacttttaaaatgcattaaaataaagaagtttcatattcagttgataaggccattaaggtaggataatgcagttacatatacaaactaaaaaa

SEQ ID NO: 2390 - DNA, 1252 bp, Homo sapiens; identical to SEQ ID NO: 2389

SEQ ID NO: 2391 - DNA, 413 bp, Homo sapiens; identical to SEQ ID NO: 2387

SEQ ID NO: 2392 - DNA, 2089 bp, Homo sapiens
tgaaacaatgaagcaataaaagcacagatttattgaagcaaaagtatattccacagagtgggagcaggctaaagcaagctgctcaagagccccagttgcaaaatctggggtttaagtaccctttaggggtttcctattggttacaccctatgcgccaccaatcggaggccgaagtgaaggctcccagtctccagactcttattctcctagctcaaagaaatccactgatttcctctgtagcatcttcaggttccatcttgacaacttcctctaaatccccaggggaagagttgtttagagactcctggatgccctgagggagcggctccagagcttgccttccctcctctgttttcacaacggtccagcgataggcactgttctctgacaatccttcttggcactgtttatcgactggtggaggccctgggctatgttccactttggggaaaacagtagcagagagaggagatagttcctggggctctaatttgggttctaggccctgaaaggcattttccccatcagccacagcacaagcaatgtccacattcatgtgggccttatcttcaggggtggatggtataggaagattcacagaattgccagaaacaattaagggtgagacagaggaggccacaaggggctggttcaatggacaggggaaggaagtagggttaaccaagagggtggcgatgggaatagtctggggactctgggccacagccgcattgacaggctggatcatgttacagccaccgccaaggctcacaatcttcacagtggtagcaggaacagtgaagataacagatgcagggtggataacaggggcaggtttgatacagcgaaaggccctggctccccttctttttgagggtctccgtctcacatatggctttcgaaacatggaagaggcaggggagggcatcattaccttgggcacaggggcagaagagagcaaagtctgggactcagacagagggaagcttgtcctggcctcagggggcatagcaggcagtgctgcaggagactcaaaactctcacctccactgacccccagtggagggacacctggaactgtctgtaaaacagtggctggctgtattgggtgaggaatccggagcaccattttgctcggaggggcttctgaatgagttgattgggctggtgttttcccagggttgaagctgggctggagagaggggctgggttggataaggaggggtttcaggactgatgaacgcttctgtctccaagccttcttggggaaacggtcggcaactggcttcagtttcaggactacacccttaggcaatagcagtgggtaccgagtttcactccccaactctgagttgtctttttctaggccttgatctgagttgatctcagtggttccagtcatatttcctacctctctagcaccatcagccatgtgccgcagttcttcctggatggatggcagactggcctattggaaatgagaacactctgatccagcacatgtcagaatttgggaaaaagaataggactttctaagtttagggacctgagacaagctcaaggcatctttccaagggactctgcatatgaaatttctacaaagaccacagtccaattatacactttagaaactcttctctgaatttcctttagcaaattaccattttacccattattttgaaaatgttgtagaatcacccggagaagggcagaaaagtaagggaagaaaggtgaatcaggaagattcctgaagtcctagttctacaactaaagcattagacgattaaggaagtccttgatattctctcagaactttcagtgaccttctgcctcctacagacttcgaggaagagggctgtacctttaaccagaatgggagccggtgttcttctctctctataggtggcttccactgatgtggctggatctcttcacagcattttcctaggactggcagctgtttggtcttcttataaaacttaacatgaaaaaaatgcgcatgaattacattccttctggaaacactgtcttctgtcaggctggtgaatggggtggtggtggatcaagagaaacacacacacacacacac

SEQ ID NO: 2393 - DNA, 1074 bp, Homo sapiens
tttttttttttttggagatggagtttcactcttgttgcccaggctggagagcagtggacatgatcttggctcactgaaacctccacctcctgggttcaagtaattctcctatttcagcctcccaaatagctagggttgcaggtctgcatcaccatgccaggctcattttgtatttttagtagagacggggtttcaccatgttggccaggcaggtctcgaactcctgacctcaggtgatctatccgcctcagcctcccaaagtgctgggattacaggtgtgggccacagcacctggcctctagcatccttataatttggtaaggccatggtttcccacacttcctgttccactagagtgatagctgtgaaccctaataagaggaacaggaggctggtagatttcttttgtcatgtggattatgggtaatttcagggaaaaaggttgattttaggcatgaaagataaaatagggctggctattccattctggccctgggcaagagagggaatgtttaaaaatccaccaccatggcaatgggtcctgtgtaagggcaggccattctattgaaataatatggtgaagacaaaggaaacaaggtcccctcagtggaggtccaagatgtagaatgtattctaaagcttgtgggtcccaaaggtcatcagccagccaaatggatccagtagaagggtcaaaatatctaggagatactatcttttgccctcactggctaactctgtaagagaatttggcctaagaaaggagggtttaagaggcctgagtgtgaattcgccctgaatgagctaccagtgccaatggtgtcacgtgtagaactcagagactataaccaggaaagataaaagagtctttctcccttccgggcagggaagctatcccgattcattccttggccttcaggtaacactggagagtggccctgtccagttgccctcaattaccaaagagctgttagaaaacagcagctgaaagactcaaaaaaagagaactcaggtctgtcacccaaactgggtgatggtgatcaggtgcttccacgtggatacccttcagtctcactg

SEQ ID NO: 2394 - DNA, 310 bp, Homo sapiens
ttttatagttattcagtattttctttttgagacggagtcttgctctgtcgcccaggatggagtgcaatggcgcgatctccgctcactgcaagctccacctcccaggttcacgccattctcctgcctcagcctccggagtagctgggactacaggtgcccgccaccacacccggctgatttttttgtatttttagtagagacagggtttcactgtgttagccaggatggtctcgatctcctgacctcgtgatccacccgcctcggcctcccaaagtgctaggattacaggcgtcagccaccgcgcccagcc

SEQ ID NO: 2395 - DNA, 16774 bp, Homo sapiens
ccggagcctctggggaggcggtcactccgacgtctgaggacctgggccttggacccggactcgttatgaagagcgattcttcgacctctgcagcccccctcagggggctcgggggacccctgcgcagcagcgagccggtgcgcgcggtcccggcccgggcgccggccgtggaccttctggaggaggcggccgacctcctggtggtgcacctggacttccgggcggcgctggagacctgcgagcgggcctggcagagtctggccaaccacgccgtggcagaggaacccgcgggcacgtacgtgctgggctcggaaatgaaccgatttccgggcgctcttgtggtggggctcaaggtctcaggagttctgtccttcccagattgcccacaaggagctttacacctcgctttcatcagtggtttgtctccgagagggtggtcgctcatcgtgtgcccattctacagagaagggaagtcgtgtaacaaaaacttagtggggatcccacagccaattatttgctccttgttccaaggtacaatgacatgatgggaaggctgaatgtgtattaagtgctaagttctgtcagtaagcaggtggtaaaagtcctctcccaggtacctccgccctccccgccccgcccaaggttgtttattcctgaccttggctgatgatggggaatgggggtcatggcaggagcagcgttctggtccaattagaggactggattaaagaattaattcagggccgggagctggggcttacgcctgtaatcccagcactttgggaggccgaggcaggaggattgcttgagcccaggagttcgagaccagcctgggtaacataatgagccctcttctctaccaaaaagaagaaaaagaaaagaatccggagaaaaaaaccttgggcttgcattgctctttctaatgccaccagcctcgtctggcaggtgagggagtcatttctttgcattgtaaacttgggttaggccacgctagggaggtggtaggtagaatagctaaagttgaccacaaagaaggatgatctggagagccctggctgtgttttaggggactgggtgggagctcatttcagtgaatgcagaaggctttgcttctgggtgtctggaggaaccttactaggtggtgccttttagccagctatggagtctatacctccactcagccagaaaccttgctccaagcccatttgttcacagagcaaactcttagttccagctctcttttcagccacacaccggtgctgtgtgttatttccccctcaggattacccttcctcttcatttaaatctgatttcacctggatacaaagatgaacgttgagcaacagctgacttgcctcttgaaagagggttacaggaacttttagttcctgggggaaagggcagcccatgagaccaattgtgaagcccatctaaatactaacagggatgagagagatgatggctgctgagttgggagctggagaggaacagtcccaaggtggaggtgggaatggaaatggaggggaaccacttctaactgaaattggtttttctgctgacagctcattggaggtgaagtgctccctgtgtgttgtggggatccaggccctggcagaaatggatcggtggcaagaagtcctctcctgggtccttcagtattaccaggtccctgaaaagctaccccccaaagtcctggagctgtggtaagtcttctttgctgactcatcagatcggttcagaaacgagaggattttcatctcctctcctaaatacctactcttttccccttccctactattgccctccagatcggattctttcccttcacttttttttccccagacttccatacatagcaataaagaataagggggaggaatttaggagtagaatagatataaagaagggaggaaacagggaataggagcgacgtgggatgacagagtggacagagctgaaagagcagcttgctacgtcctaggaattcctaattcttaaaaaaaaattttgttttgttttgttttgttttgttttttgagacggagtctcgccctgtcgcccaggttggagtgcagtggcacagtctctgctcactgcaagctccacctcccgggttcacaccattctcctgcctcagcctcccgagtagctgggactacaggcgcctgccaccacgcccggctaatttttttgtgttttaagtagagacagggttttaccgtgttagccaggatggtctcaatctcctgacctcgtgatccacctgcctcggcatcccaaagtgctgggattacagatgtgagccatcgcccctggccaaaaaataacaaagtttttaaaattgacacttgtacatatttatggggtaaattagacatttcaatatatgctgtgtatatgttgtataatgatcaaatcagggtagttagcatatccatcacctcatgcatttatcatttgtttgtgacaggaacattcaaaagcctctcttccagctattttatatatacaataccttactgttaaccataaccaccctaccgtgcaatagaacaccacaacttattcctcctatcccaccgtaactttgtacccattgacgaacctcttcccgtcttccttttcttccttcctttcccagtctctggtaaccaccgttctaccgtctgcttctatgatatcaacttttttttttttttaaagattcacatgagtgaaatcatgtagtatttatctttctgtgcctggcttatttcacttaacatgatgtcccccaggtccacctgtgttgtcatgaatgacaagatttcattcttttttatggctatatagtattccattatatatatatatatatatatatatgcgtgtgtgtatatatatacacatatataaacacatatatacacataatatacatatatgtacacatatacacacacacacacacacacacacacacacacacattatccattcatctgttgttggacacttaggttgattccatatcttggctgttgtgaatagtgctgcattaaacaggggagataatggattgctagatcatgtggtagttctatttttatttttttcacctggccattcttaagtttattttgatgacacccggtgacagttccctgtacctagaagaaggtgttgggactcttgatgttggagtgtggcttgtgctgaagacacaggacctggtagggcagcaggaacttgatcttggaattgtggaactgcttgactgtcggccggtggcagtaccagaagcgggacttggcacaacttgcttaggtgcagagatttgctggcagtagaggggcagcatgtggcatttgggggtgggcaggcagcaaatactctctcagtgtgccccaggccttcatggcattctctcagcacttgccaccacttacaaaaaggaagtgccgtctttcctattttgaattttttaaaggaacctgcattctgttttccataatggctgtactaatttacagtcccaccaacagtgtgtaagtgctgcctttctccacatcctcacccgcaccaacactcgttttcttttgtctttttgataagagctgttctaactggagcgaggtagtgtctcattgtggttttgattggcatttccctgatgattagtagtgttgagcattttttcatatacctgttggccatggtacgtcgtcttctgagaaatgtctgttgaggtctttttcccttttgaatcaggttttttttttttttttctgctgttaagttcctgatatattctggatattaacgctttgtcagatggatagtttgcaaatattttctcccattctgtaggttgtttcttcactcttaattgcttcctttgctgtgcagaagtttttagtttgatgtcatttcatttgtccatttttgcttttgttaccagtgcttttaaggtcttactgaaaaaaacacttgctcagcccagtgttgtgaggcatttctcctgtgctttcttctagtagtttcatggttttggattttacatttaagtcttgaatccattttgagttaatttttgtatgtggggaaaggtaggggtctggtctcctgcatatggatatccgattttcccagcaccatttattaaagagactgtcttttcccctgtgtgtgttcttggcacctttgttgaaaatcagttggctgtaggtgcatgaatttatttctgggctctctgttctgttctattttgtctgtttttatgccataacatgctgttatggttactgttatagctttgtgtagtatggtttgaagtcaggtaatatgatacctccagctttgttctttttgctcacaactgctttagccatttggggtcttttgtggttccatacgaatttcaggattgttttttctgtttctgaagaatgccattggtgttttgatagggattgcattaaatctgtaaattgctttgggtattttaataatattcttccaatttgtgaatgaacacgggatatctttccattttttgtgtgtccccttcaacttctttcatcaatgttttatagttttcagtgtagagatcttttgccagcttggtttaatttattcctaggtatcttatttttttggtagctattgtaaatcgaattgttttcttgatctcttttccaatggttcactgtcacgtatagaaacgctgttttttgtacattgatttttgtatcccacaactttactgaatccgtttattagttctgtctgcaaacagggataacttgacttcctcctttccaatttggataccttttatttctttctgttgcccgattgctctggctatgacctccagtactatgttgaataaaaacggtcaaagtaggcatctttgtcttgctcctgatcttagaggaaaggctttcagcttttcccattgattatgctgttagtgatgggtgtgtcgtggggaattcccatgagcatcatcatttcatcggaaagggctcgaggacacagtgaggaggggctggataggagaagcatagtggtcatgggaaatgaaccaatcattgagcactgactcttcttttgttgggattgggttttttggggactgcagcattcttttatacagcaaaatgcaagagcctggagctgtgctggatgtggtgggtgcctggctccaagacccagccaatcaaaaccttccagaatatggagccttggcagaatttcacgtgcagcgggtgctgctgcctctgggctgcttatcggaggctgaggagctagtggtgggctctgcagcctttggtgaggagcggcgactggatgtacttcaggccattcacacagcgaggcagcagcagaaacaggaacactcaggctctgaggaggcccagaagccaaacctggaaggtaggacattatccctctgcgacctctgtaaagtggacttgcgggcttgcactgtacctcggggtctgtcgtgaaactcctgcgagcttagaagcagttctttgtatgaataactcttgagtcacagaataggaggcctgttgatttgcttcacaaagtgaaggccagaccctctgaagttggcagtggaaggagaatctccacatgggaaggtgttgctgggtcttgggaccttgacttgtcttttgaaagtcattttcccattggagtcctctgatgaggtctcttgcttccaccatactggtctgggtgggatgtccttcctcctttaaatgctggccccaatacagacacagctgagatctgctgggatagccaaaggaatatcagaaactaatttgcagaccctttccctggtcgctgaatcttttccgcccttttccttgagtgatgatctagtctagttgtgaatacttcaaggacagaaagtcaccatctctctctctttttttttttttttttttttgtttgagacggagtctcgctctgtcgcccaagcgggaatgcagtgatgcgatctccgctcactgcaagctgcacctctcaggttcacgccattctcctgcctcagcctcctgagtagctgggactacaggtgcccgccaccacacctggctaatttttgtatttttagtagagacggggtttcaccgtgttagccaggatggtctcaatctcctgacctcgtgatctggctgccttggcctcccaaagtgctgggattactggcatgagccactgcgcctggcctgaaaggttctgaaaggttttaaaaaacttttacaaagatgcattcaatatagtaaataatatatagtcaaaataagtaataaacacgaggaaaacaatttatattcatgagatttgcaagagtatgtgcagttaaggaatgaaggctttagccaatacctaatacccttttactaaactcttttttttttttttttgagacggagttttgctcttgttgcccaagctggagtgcaatggcacgatcttggctcactgcagcctccacctcccagattcaagtgattctcgtgcctcaggctcccaagtagctgggactacaggcgcacaccaccacgcctggctaatttttgtatttttagtagagacggggtttcaccatgttagccaggatggtctcgatctcctgaccttgtgatccacctgcctcagcctcccaaagtgctgggattacaggcatgagccactgcgcctggcctgctcaggtcttagaagcaagcacagaggtcggggtcagggaagctgattcccatgacatccctgaagctgtgctctgtctccctggccaggctctgtctcccacaagttcctgtcactaccgatgttggttcgccagctttgggactctgcggtgagccacttcttttctctgcccttcaaaaagagtctcctggctgccttgatcctctgtctcctggtggtgagatttgatccaggtaagaggtggagactctcccctgtccttcctgggaaggggttgttgccagggctgggcctgtgggagtgggtgtttgtcagagtcctactggggaggggagtctctcctatgacatttcccctgagtctgttccacaaggaggaattgctagactgggcatgagccagccccacccataaggagaggccagtcctggagtctatgagagcagccaggagaaagtccacttggccctgctgactcctgaacatggactgagtcatagtcctccactttttctagggctgaactctgactagaacctcagaatttaaaaaaacttcctcttggccaggcacggtggctcacgcctgtaatcccagcactttgggaggccaaggcaggcagatcacaaggtcaggaaatcgagaccagcctggccaacatggtaaagccccatctctactaaagatacaaaaaaaattagccaggtgtagtggcacatgcctgtagtcccagctacttgggaggttgaggcaggagaatagcttgaacccgggaggcggaggttgcagtgagccaagatcgcactgctgcactccagcctgggcaatagagcgagactctgtctcaaaacaaaaaacaaaaaacaaaaaaacttccgctcatcagaatatctacaaaagtgttaattcaagtattaatgtctcatgaagtgttaattcaaagcaagttgtaaatgaaaaactcatacattttagaaaatgtggaaaataggccggacatggtggctcacacctgtaatcccagcactatgggaggccaaggagggtggatcacctgaggtcaggagttcgagaacagcctggccaatatggtgaaaccccgtctctactaaaaatacaaaaattagccaggtgtggtggtgcgtgcctgtaatcccagcaactggggagggtgaggcagggagcattgcttgaacccaggaggcggaggttgcagtgagccaagattgcactgttgccctctggcctgggctacaagagcgaaactctgtctcaaaaaagaaaaaaaaatgtggaaaatagagaaaagtataaagaagggcatagaaatctgctactctgctgtgctttcagtctttttctatggatatagagattgtaggcagttacatgtcacacatatgctttcaagcatggccttaaatcgctaactattccagttcacaggaatgcccctaagtaatttaacaacccctattattgaacatttgggtgattattctgttttctgcctcgctgtgaagaaggaatgagctccctaagtgatatttgggaacaaccccagttatttcctgaggattgacccctcaggtgcatgaagccaaacttggcactcgctcttttagatttttttgtgttactcagtgtgagttatgttctaatctctactcttctcatgaatttagacttagaatatgattaaataagtttcaaaatttaagaggaaatcagaaacccttatactggtcccttcaaatggtttgtctattttgagaagtgccatttgttaacttagtctttagattctccctgtttccccatttctctttctcttattcagtgagcttttttaaaatatttatttatttatttttatttttattttattttatttatttagtttttgatactgggtctttctctgttgcccaggctggagtgcaccggcgtgatcttggctcactgcaacctctgcctcctaggctcaagcgatcttctctcctcagcctcccaagtaactgggactacaggcatgtgcctccatgcccggctaattttttatttttatttttgagacagagtcttgctctgttgcccaggttgcagtggcgtgatctcggcttactgcaacctccgcctcctgggttcaagcgattctcctgcctcagtatcccaagtagctgggattacaggcacacaccaccatgccaggctacattttgtatttttagtagagacggggtttcgccatgtttgccaggctggtctccaacttctggccttaagtgatcctctcacctcagcctcccacagtgctgggattataggcacaagccatcatgcctggccagcgaggtttccgtcacatagctcagagttgtccttctaacccgtctgctgaatgctgagcagggatcccctgtggacgactctgtttgctttacaaagaagtcacgagttagcgctcggaatgctcagtatcatcagcgttcatccctggccacctcctgactgatacagatttagaaactctttatgattctttatggttcccgtaagccctttagtctcgtaaaccctggtctcctagtggggatggcatgaggacatttgagcctgctctttccaaggctgcttcagaagggcctggcccagtggccctgaccctcagcagcaggcccgactcattggagtgatgatggtgggggaggagaacctgcacctgcaggctgaggatcgcatgagccccagagattgaggctgcagtgagctgaacacagactgcactgtactctagcctaggtgacagagcgagaccctgtctctaaaaaaaacaaaacaaaaccaactatgtgtaattggtagtggagtctcccagggtgggagatggcagagtgacaggtgagaggggtgggacgttcactgtagtctccctctgccctgcagcttccccttcctccctgcacttcctctacaagctggcccagctcttccgctggatccggaaggctgcattttctcgcctctaccagctccgcatccgtgactgagggtccctgcgcaccacagcctctctgctcctcacgtccgtggccacagaagcagagcgacagagcgacacatccacaggcgcccctggggaaatgggaccagcctaatctcgcggagtgcactgtgtcttgctgcctgggtgccctctcctttgcaccctacttcggctggtcgcggtagatgatgtggaaacaaagcaggaccagcaggcacagcacctccagaacagtgccccggatgaccagaggccccttgaaaaggaggggtttggggacagggactgtgtccatgaaacattccatcttcttggtgaaggcaaggggttggttcttcaggtcaggatgttaatggagctggaagttcagaaaaagcctggtgaagtgacccttggcctttcacttcttgagaaacatacttctttgctgggcatggtgactcacgcctgtaatcccagcactttggaagggtgaggtgggtggatcacttgtggccaggagttcaaaacctgcctggccaacatggtgaaaccccatctctactaaaaatacaaaaattagctagatgtggtgcacgcctatagtcctagctacttgggaggctgaggcaggagaatcacttgagccagggaggcaaaagttgcagtgagctgagattgtgctaccgcactctctcaaaacaaacaaaaaaacatgccccacaggacagtaccttaattagctagagtagatctgagagggcctcttcttgcctgcactgtgctccccagagctgatctaattctgtatcaataggctgttcccatggtcttgccatgcgcttgaagctgcaggagccttctcactgttcaggctggggtgtggttttcagaaccaccgggttgactactgaaaaccaagtgagccttacagctcttatcgctgggtaaagtgatcttgcctggtgcctcttggtcttcagctcaattttccaggttgtcctggccaagtcttgctctgttacgctcagtgcctctgcccactctttccccgccagcccttccctcccgccctgcaaacttgtcccttggctgtttcaccaggttctgcctgtatccttgcctccttggtacacaccatttcaggttcttccctttctgtgtcccattgtcctagttatgttctgttgtttgtgtaatgcccaaatttttctgctcgtgtggccttgaaaagtaggccagcctcagaggctgctgagctgaaaatggaactgagtaatcaggtgagctggaagggatgtggggggcggggcagacgggagacatgggttttgaaggcagtgaacaataaaaccttagggaggtggcaccgaggccttagcatttgaggagctgaaatgtttcagtgttgttttctcaccagccacaagcatcttatgagtttctgtgcaaggaagcgtagagcactgctgtgctgtcaggatgaagaagggctttctgcaggggctggcctttctctacccagaggccaagcaggctgccctgcactgtgtccttggtgttgatgcccaaaatagagaaggtgcttgctagcttttccttggtacattttcgggggttgcaaggcaacaagttttcttttgttttgtttgtttgtttgtttgtttgtttttgagatggagtctctgtcacccaggctggagtgcagtggcgtgatctcagctcactgcaagctccgcctcccgggttcatgccattctcctgcctcagcctcccgagtagctgggactacaggtgcccaccacctcgcctggctaatatttttgtatttttagtagagtctgggtttcactgtgttagccgggatggtctcgatctcctgaacttgtgatccacccacctaggcctcccaaagtgctgggattacaggtgtgagccatcgcgcccggccaacttttctttagaaaaatgagtaaagtaggtaaacttcacaggccccttagaattaaatccttagggcatggttcaagtctgtaggaagcaaatctatacttttttatatgggcttttaagtaaagcttagaaccctggggggagaaaagcagtcaggtgaggtttgagattccttctatagaatgatttcttaaaatgaaaatctgggcccacttaactaccctagataaaacgcttcaatggcttcccatggctcactggataacatctaaattcttcatggaattgaaggcccctatgtgctggttttggctaagatctcccctttgatgtgggtcccctgttgattatatgtgcggccttccagctgcccaccatcacagctacagctcgctccccttggcctctgtgccttggctcgcactgttcctactgaaggcctagcacctgctcttggcctggtgagcccctccaccttccaggcttactcaaagaattctttctgcccctccctgtgtcccgggacctgtttcatatcgcttctgtggtcgtgaccccatggtcttgtaattgtgaacttctttgctgccccttcgaagctggggagtgcttgttgcagatgcatccaagaggggtaattgcgtatcaacagtggatttgctggttgtttctacagggttctgaagcatgcaacatagaacagatacctttaaatttaggggcgctaaggaaagcaggaaccagtaatcctcttctgtggtgggatgggagggtgggggagaggggtggaatggagaggaaacaggctattgttggccagccctgggtggaggtgggtgcaagcaggacagatagtgcctgggggtgggggcggagggttcgcctctaggaaggggctagaagggatgaggaaatagttcatagcttcgtgcaggtgatccctattctgcgtgtatgtgtttgcacatgagtgtttgtagaccatagaccattaaaaaatacggaattcaaaagttacaaaaagggtattcttggaaaagaaagttgtttttttttagtcttgctgtgttgcccaggctggacctgaactcctgggcttgagcaagtcttcccctcagcctctggagtagctgggcctacagtgtgtgctgccacacccagctaatacagtctttctactcccgctctctattccccagtttcttgcccagaggcaacccttgccagtctgtttatccctccagatacagtctctgatagtaaacttttctttctcttacacaaatgatagtagtcacatacactacacacactgtgccacgtttaaaaagaaaaaaaacaattctcggctgggcgcggtggcgcatgcctgtaatcccagcactttgggaggccaaggtgggtgaatcacctgaagtcaggagttcgagatcagcatggccaacatggtgaaaccccatctctactaaaaatacaaaaaaaaaatgagccgggcatggtggtgggtacctgtaatcccagctactcaggaggctgaggcaggagaatcacttgaacccgggaggcaagggttgcagtgagctgagatcgcgccattgcactcccacctgggcaacaaagagtgaaacttggtctcagaaacgaaacaaaacacaaaaacctttctcagtcccagcatatgtggagcagcctcattcttcatagctgtgtgtcattccgttgcgtgatggggtcacagagcacagacctggtgcccttttcctttttaatatgtggaaacccctccatgctttccaaagcctacaagtacagcagccccaagtttagggtgagcagcagtggtcagagctctttactattacttttgggcaaacgcaagccaggctggcaaccaccactgccgccgaggggagatacaagcaggccagttcacactctggacgttcagtttctttctacatctagaaggtggcctctgctatccacttaaagcagcccaaggaactgtcagaaagcgaaagtgatgacatgaaccgcgagtagggcacctccctgtgccgtcgtctgctttccttcctccctcccagcctccctgtgccgtcctctgctttcctccctcccagcacggaaaagccgtggggccgatggactttggcctcacatccacagatggggcctgtgggaattctactgatttactctctggcctagtcaagcaacccacccacggcctggccaaggtcggcctcaccgccctggcctagcacctttggaaactgaatacatggagtgttaaccagaaaaatgtctggcccttttgcctcgctgcctctggaaacctcagtgtttcgggctggtaggaagctacaggacagacagtgggcacggtgcctagcagcctgtcgcgcccccgcccgcctctgcattcctccagcggtggtgtacggatccagacattgtttgccacctctaggcctcttgataaaacagcaagtatttttcttgtcttaaagcaatgcatgtatattttagaaaatattaattgcatagaaggaaatacaggactcgtgatcccaccactcagaaataattactattaatacggttgattttctttcagcttttttccccctaattaattaactaattcttttttttcctgcaactcctgcttcacagactttttttttttttttaacttggcatggtggctcacacctataatcccagcactttgggaggccagagtgggaggattgcttgagcctaggagttcaaagctagcctgggcaacctagtgggaccccatttcttttttttggggggggggtgggttataaaagcccttttataaagccaattttaaacaagaaaaaaacaaaaagtttacaaaagaaaaaaagatacagaaaaagaataacttgcttcatatgtcccaaaaagagaaaaaaataaacgggacaatgccaacatgctcaacaataaagggttctttttcttacttttttaatacaaaatacaagcaaaggatacacatacttaaaacagagctcaggagcagacacgcagtcctgggaacccttcaataagagcaaagcaggagtttgttttttctttgtgcagatacatacagagactgggatatgtaaaaattaagtatcacaaaagaccatcacacgattctaccaatgcatgttgcatctataattcacgaacatggtcaacaagatcatgttcacttcaaccccatttcatttaaattaaagaaaaaaacctggccgggcgcggtggctcacgcctgtaatcccagcaccttgggaagccgaggcaggtggatcacgaggtcaggagatcgagaccatcctggctaacacggtgaaatcccatctctactaaaaaaatacaaaaaattagccgggcgtggtggcgggtgcctgtagccccagctactcgggaggctgaggcagaagaatggcgtgaacccaggaggcggagcttgcagtgagcctagatggcgccactgcactccagcctgggggacagagcaagactccgtcttaaaaaaaaaaaaaacaaaaataaaccttttaaataaagtggttacattctaactttaacttccttagtaccatgctgcaggtttcagcactgttaaggtattgcaagaatgcccaaccctctggtgtctgattgtgtatctagcaacattgcagtatgaagaaaagagatgccccgggtacgaccccatttctattaaaaataaatgtaaacacccaaccctcttggcagcccatgcacttgagaacctgtagaaaatggcagtgtgcaaccagcatggctgcgagctcagcgtcttcactagagagagtggaggtggttaggaaagggcaggcgggaaggggccatgttggccggacaactgcaggtgaagatgggattgtgaagtacagtccaaggcccactcaccaagggctggatccaaatatgtggggttgggattctgtgacctacttccaattttaatattgacctgagctcatatttagctctacatgtttcccagctcgtattttccaacagcccctttaaaacttttagcatcctcttgtcacttttgtactatccaaggtgggacggacaggtgtcagataatagcagagacttggtgaagaaatgaaagcacttttgtagaagagtgtcatttcagaaaaaagccttttttttttgagatggagtctcgctctgtcacccaggctggaatgcagtggcgtgatctcagctcactgcaagctccgcctcctgggttcacaccattctcctgcctcagcctcccgagtggctgggactataggcgcccgccaccacgcctggctaattttttggtatttttagtagagactgggtttcaccgtgttagccaggatggtctcgatctcctgacctcgtgatccgcctcccacagtgctgggattacaggcgtgagccacggcacctggagagaaaaaagcttctttaatgacgacctcaacataatttacatggagaagtttcttaggtggaaaaccgatttgtatggtcctcagaatgtaacctacaggttcttgccctcagaaaaatgcatgcatacttttatgttacaggcttattttccaaatgcggtagagggccatcccttctttggcttcttgccttgtctctgaccccactgactgccccttttctgcctccatagctagtttcttattttcctttggctttttttttcttttcttttcttttcttctttttttttttgagatggaatcttgctcttgtcacctaggctggagtgcagtggtgcgatctcggctcactgcaccctcctcttgggttcaagccagcgaggtagatattatcattttagagacagcaaaacagactcagaggggctaatgtgcccagtgccccaccgcttttaaatggtagagctgggatttgaatctaggcatacaggtaccaggatttctgttcttatctcccccatagcacctggaatgaggccatccatgtaagaggccaagtaataaagatttgttgaatgaa

SEQ ID NO: 2396 - DNA, 15843 bp, Homo sapiens
ccggagcctctggggaggcggtcactccgacgtctgaggacctgggccttggacccggactcgttatgaagagcgattcttcgacctctgcagcccccctcagggggctcgggggacccctgcgcagcagcgagccggtgcgcgcggtcccggcccgggcgccggccgtggaccttctggaggaggcggccgacctcctggtggtgcacctggacttccgggcggcgctggagacctgcgagcgggcctggcagagtctggccaaccacgccgtggcagaggaacccgcgggcacgtacgtgctgggctcggaaatgaaccgatttccgggcgctcttgtggtggggctcaaggtctcaggagttctgtccttcccagattgcccacaaggagctttacacctcgctttcatcagtggtttgtctccgagagggtggtcgctcatcgtgtgcccattctacagagaagggaagtcgtgtaacaaaaacttagtggggatcccacagccaattatttgctccttgttccaaggtacaatgacatgatgggaaggctgaatgtgtattaagtgctaagttctgtcagtaagcaggtggtaaaagtcctctcccaggtacctccgccctccccgccccgcccaaggttgtttattcctgaccttggctgatgatggggaatgggggtcatggcaggagcagcgttctggtccaattagaggactggattaaagaattaattcagggccgggagctggggcttacgcctgtaatcccagcactttgggaggccgaggcaggaggattgcttgagcccaggagttcgagaccagcctgggtaacataatgagccctcttctctaccaaaaagaagaaaaagaaaagaatccggagaaaaaaaccttgggcttgcattgctctttctaatgccaccagcctcgtctggcaggtgagggagtcatttctttgcattgtaaagttgggttaggccacgctagggaggtggtaggtagaatagctaaagttgaccacaaagaaggatgatctggagagccctggctgtgttttaggggactgggtgggagctcatttcagtgaatgcagaaggctttgcttctgggtgtctggaggaaccttactaggtggtgccttttagccagctgtggagtctatacctccactcagccagaaaccttgctccaagcccatttgttcacagagcaaactcttagttccagctctcttttcagccacacaccggtgctgtgtgttatttccccctcaggattacccttcctcttcatttaaatctgatttcacctggatacaaagatgaacgttgagcaacagctgacttgcctcttgaaagagggttacaggaacttttagttcctgggggaaagggcagcccatgagaccaattgtgaagcccatctaaatactaacagggatgagagagatgatggctgctgagttgggagctggagaggaacagtcccaaggtggaggtgggaatggaaatggaggggaaccacttctaactgaaattggtttttctgctgacagctcattggaggtgaagtgctccctgtgtgttgtggggatccaggccctggcagaaatggatcggtggcaagaagtcctctcctgggtccttcagtattaccaggtccctgaaaagctaccccccaaagtcctggagctgtggtaagtcttctttgctgactcatcagatcggttcagaaacgagaggattttcatctcctctcctaaatacctactcttttccccttccctactattgccctccagatcggattctttcccttcacttttttttccccagacttccatacatagcaataaagaataagggggaggaatttaggagtagaatagatataaagaagggaggaaacagggaataggagcgacgtgggatgacagagtggacagagctgaaagagcagcttgctacgtcctaggaattcctaattcttaaaaaaaaattttgttttgttttgttttgttttgttttttgagacggagtctcgccctgtcgcccaggttggagtgcagtggcacagtctctgctcactgcaagctccacctcccgggttcacaccattctcctgcctcagcctcccgagtagctgggactacaggcgcctgccaccacgcccggctaatttttttgtgttttaagtagagacggggttttaccgtgttagccaggatggtctcaatctcctgacctcgtgatccacctgcctcggcatcccaaagtgctgggattacagatgtgagccatcgcccctggccaaaaaataacaaagtttttaaaattgacacttgtacatatttatggggtaaattagacatttcaatatatgctgtgtatatgttgtataatgatcaaatcagggtagttagcatatccatcacctcatgcatttatcatttgtttgtgacaggaacattcaaaagcctctcttccggctattttatatatacaataccttactgttaaccataaccaccctaccgtgcaatagaacaccacaacttattcctcctatcccaccgtaactttgtacccattgacgaacctcttcccgtcttccttttcttccttcctttcccagtctctggtaaccaccgttctaccgtctgcttctatgatatcaacttttttttttttttaaagattcacatgagtgaaatcatgtagtatttatctttctgtgcctggcttatttcacttaacatgatgtcccccaggtccacctgtgttgtcatgaatgacaagatttcattcttttttatggctatatagtattccattatatatatatatatatatatatatgcgtgtgtgtatatatatacacatatataaacacatatatacacataatatacatatatgtacacatatacacacacacacacacacacacacacacacacacattatccattcatctgttgttggacacttaggttgattccatatcttggctgttgtgaatagtgctgcattaaacaggggagataatggattgctagatcatgtggtagttctatttttatttttttcacctggccattcttaagtttattttgatgacacccggtgacagttccctgtacctagaagaaggtgttgggactcttgatgttggagtgtggcttgtgctgaagacacaggacctggtagggcagcaggaacttgatcttggaattgtggaactgcttgactgtcggccggtggcagtaccagaagcgggacttggcacaacttgcttaggtgcagagatttgctggcagtagaggggcagcatgtggcatttgggggtgggcaggcagcaaatactctctcagtgtgccccaggccttcatggcattctctcagcacttgccaccacttacaaaaaggaagtgccgtctttcctattttgaattttttaaaggaacctgcattctgttttccataatggctgtactaatttacagtcccaccaacagtgtgtaagtgctgcctttctccacatcctcacccgcaccaacactcgttttcttttgtctttttgataagagctgttctaactggagcgaggtagtgtctcattgtggttttgattggcatttccctgatgattagtagtgttgagcattttttcatatacctgttggccatggtacgtcgtcttctgagaaatgtctgttgaggtctttttcccttttgaatcaggttttttttttttttttctgctgttaagttcctgatatattctggatattaacgctttgtcagatggatagtttgcaaatattttctcccattctgtaggttgtttcttcactcttaattgcttcctttgctgtgcagaagtttttagtttgatgtcatttcatttgtccatttttgcttttgttaccagtgcttttaaggtcttactgaaaaaaacactcgctcagcccagtgttgtgaggcatttctcctatgctttcttctagtagtttcatggttttggattttacatttaagtcttgaatccattttgagttaatttttgtatgtggggaaaggtaggggtctggtctcctgcatatggatatccgattttcccagcaccatttattaaagagactgtcttttcccctgtgtgtgttcttggcacctttgttgaaaatcagttggctgtaggtgcatgaatttatttctgggctctctgttctgttctattttgtctgtttttatgccataacgtgctgttatggttactgttatagctttgtgtagtatggtttgaagtcaggtaatatgatacctccagctttgttctttttgctcacaactgctttagccatttggggtcttttgtggttccatacgaatttcaggattgttttttctgtttctgaagaatgccattggtgttttgatagggattgcattaaatctgtaaattgctttgggtattttaataatattcttccaatttgtgaatgaacacgggatatctttccattttttgtgtgtccccttcaacttctttcatcaatgttttatagttttcagtgtagagatcttttgccagcttggtttaatttattcctaggtatcttatttttttggtagctattgtaaatcgaattgttttcttgatctcttttccaatggttcactgtcacgtatagaaacgctgttttttgtacattgatttttgtatcccacaactttactgaatccgtttattagttctgtctgcaaacagggataacttgacttcctcctttccaatttggataccttttatttctttctgttgcccgattgctctggctatgacctccagtactatgttgaataaaaacggtcaaagtaggcatctttgtcttgctcctgatcttagaggaaaggctttcagcttttcccattgattatgctgttagtgatgggtgtgtcgtggggaattcccatgagcatcatcatttcatcggaaagggctcgaggacacagtgaggaggggctggataggagaagcatagtggtcatgggaaatgaaccaatcattgagcactgactcttcttttgttgggattgggttttttggggactgcagcattcttttatacagcaaaatgcaagagcctggagctgtgctggatgtggtgggtgcctggctccaagacccagccaatcaaaaccttccagaatatggagccttggcagaatttcacgtgcagcgggtgctgctgcctctgggctgcttatcggaggctgaggagctagtggtgggctctgcagcctttggtgaggagcggcgactggatgtacttcaggccattcacacagcgaggcagcagcagaaacaggaacactcaggctctgaggaggcccagaagccaaacctggaaggtaggacattatccctctgcgacctctgtaaagtggacttgcgggcttgcactgtacctcggggtctgtcgtgaaactcctgcgagcttagaagcagttctttgtatgaataactcttgagtcacagaataggaggcctgttgatttgcttcacaaagtgaaggccagaccctctgaagttggcagtggaaggagaatctccacatgggaaggtgttgctgggtcttgggaccttgacttgtcttttgaaagtcattttcccattggagtcctctgatgaggtctcttgcttccaccatactggtctgggtgggatgtccttcctcctttaaatgctggccccaatacagacacagctgagatctgctgggatagccaaaggaatatcagaaactaatttgcagaccctttccctggtcgctgaatcttttccgcccttttccttgagtgatgatctagtctagttgtgaatacttcaaggacagaaagtcaccatctctctctctcttttttttttttttttttgtttgagacggagtctcgctctgtcgcccaagtgggaatgcagtgatgcgatctccgctcactgcaagctgcacctctcaggttcacgccattctcctgcctcagcctcctgagtagctgggactacaggtgcccgccaccacacctggctaatttttgtatttttagtagagacggggtttcaccgtgttagccaggatggtctcaatctcctgacctcgtgatctggctgccttggcctcccaaagtgctgggattactggcatgagccactgcgcctggcctgaaaggttctgaaaggttttaaaaaacttttacaaagatgcattcaatatagtaaataatatatagtcaaaataagtaataaacacgaggaaaacaatttatattcatgagatttgcaagagtatgtgcagttaaggaatgaaggctttagccaatacctaatacccttttactaaactcttttttttttttttttgagacggagttttgctcttgttgcccaagctggagtgcaatggcacgatcttggctcactgcagcctccacctcccagattcaagtgattctcgtgcctcaggctcccaagtagctgggactacaggcgcacaccaccacgcctggctaatttttgtatttttagtagagacggggtttcaccatgttagccaggatggtctcgatctcctgaccttgtgatccacctgcctcagcctcccaaagtgctgggattacaggcatgagccactgcgcctggcctgctcaggtcttagaagcaagcacagaggtcggggtcagggaagctgattcccatgacatccctgaagctgtgctctgtctccctggccaggctctgtctcccacaagttcctgtcactaccgatgttggttcgccagctttgggactctgcggtgagccacttcttttctctgcccttcaaaaagagtctcctggctgccttgatcctctgtctcctggtggtgagatttgatccaggtaagaggtggagactctcccctgtccttcctgggaaggggttgttgccagggctgggcctgtgggagtgggtgtttgtcagagtcctactggggaggggagtctctcctatgacatttcccctgagtctgttccacaaggaggaattgctagactgggcatgagccagccccacccataaggagaggccagtcctggagtctatgagagcagccaggagaaagtccacttggccctgctgactcctgaacatggactgagtcatagtcctccactttttctagggctgaactctgactagaacctcagaatttaaaaaaacttcctcttggccaggcacggtggctcacgcctgtaatcccagcactttgggaggccaaggcaggcagatcacaaggtcaggaaatcgagaccagcctggccaacatggtaaagccccatctctactaaagatacaaaaaaaattagccaggtgtagtggcacatgcctgtagtcccagctacttgggaggttgaggcaggagaatagcttgaacccgggaggcggaggttgcagtgagccaagatcgcactgctgcactccagcctgggcaatagagcgagactctgtctcaaaacaaaaaacaaaaaacaaaaaaacttccgctcatcagaatatctacaaaagtgttaattcaagtattaatgtctcatgaagtgttaattcaaagcaagttgtaaatgaaaaactcatacattttagaaaatgtggaaaataggccggacatggtggctcacacctgtaatcccagcactatgggaggccaaggagggtggatcacctgaggtcaggagttcgagaacagcctggccaatatggtgaaaccccgtctctactaaaaatacaaaaattagccaggtgtggtggtgcgtgcctgtaatcccagcaactggggagggtgaggcagggagcattgcttgaacccaggaggcggaggttgcagtgagccaagattgcactgttgccctctggcctgggctacaagagcgaaactctgtctcaaaaaagaaaaaaaaatgtggaaaatagagaaaagtataaagaagggcatagaaatctgctactctgctgtgctttcagtctttttctatggatatagagattgtaggcagttacatgtcacacatatgctttcaagcatggccttaaatcgctaactattccagttcacaggaatgcccctaagtaatttaacaacccctattattgaacatttgggtgattattctgttttctgcctcgctgtgaagaaggaatgagctccctaagtgatatttgggaacaaccccagttatttcctgaggattgacccctcaggtgcatgaagccaaacttggcactcgctcttttagatttttttgtgttactcagtgtgagttatgttctaatctctactcttctcatgaatttagacttagaatatgattaaataagtttcaaaatttaagaggaaatcagaaacccttatactggtcccttcaaatggtttgtctattttgagaagtgccatttgttaacttagtctttagattctccctgtttccccatttctctttctcttattcagtgagcttttttaaaatatttatttatttatttttatttttattttattttatttatttagtttttgatactgggtctttctctgttgcccaggctggagtgcaccggcgtgatcttggctcactgcaacctctgcctcctaggctcaagcgatcttctctcctcagcctcccaagtaactgggactacaggcatgtgcctccatgcccggctaattttttatttttatttttgagacagagtcttgctctgttgcccaggttgcagtggcgtgatctcggcttactgcaacctccgcctcctgggttcaagcgattctcctgcctcagtatcccaagtagctgggattacaggcacacaccaccatgccaggctacattttgtatttttagtagagacggggtttcgccatgtttgccaggctggtctccaacttctggccttaagtgatcctctcacctcagcctcccacagtgctgggattataggcacaagccatcatgcctggccagcgaggtttccatcacatagctcagagttgtccttctaacccgtctgctgaatgctgagcagggatcccctgtggacgactctgtttgctttacaaagaagtcacgagttagctctcggaatgctcagtatcatcagcgttcatccctggccacctcctgactgatacagatttagaaactctttatgattctttatggttcccataagccctttagtctcgtaaaccctggtctcctagtggggatggcatgaggacatttgagcctgctctttccaaggctgcttcagaagggcctggcccagtggccctgaccctcagcagcaggcccgactcattggagtgatgatggtgggggaggagaacctgcacctgcaggctgaggatcgcatgagccccagagattgaggctgcagtgagctgaacacagactgcactgtactctagcctaggtgacagagcgagaccctgtctctaaaaaaaacaaaacaaaaccaactatgtgtaattggtagtggagtctcccagggtgggagatggcagagtgacaggtgagaggggtgggacgttcactgtagtctccctctgccctgcagcttccccttcctccctgcacttcctctacaagctggcccagctcttccgctggatccggaaggctgcattttctcgcctctaccagctccgcatccgtgactgagggtccctgcgcaccacagcctctctgctcctcacgtccgtggccacagaagcagagcgacagagcgacacatccacaggcgcccctggggaaatgggaccagcctaatctcgcggagtgcactgtgtcttgctgcctgggtgccctctcctttgcaccctacttcggctggtcgcggtagatgatgtggaaacaaagcaggaccagcaggcacagcacctccagaacagtgccccggatgaccagaggccccttgaaaaggaggggtttggggacagggactgtgtccatgaaacattccatcttcttggtgaaggcaaggggttggttcttcaggtcaggatgttaatggagctggaagttcagaaaaagcctggtgaagtgacccttggcctttcacttcttgagaaacatacttctttgctgggcatggtgactcacgcctgtaatcccagcactttggaagggtgaggtgggtggatcacttgtggccaggagttcaaaacctgcctggccaacatggtgaaaccccatctctactaaaaatacaaaaattagctagatgtggtgcacgcctatagtcctagctacttgggaggctgaggcaggagaatcacttgagccagggaggcaaaagttgcagtgagctgagattgtgctaccgcactctctcaaaacaaacaaaaaaacatgccccacaggacagtaccttaattagctagagtagatctgagagggcctcttcttgcctgcactgtgctccccagagctgatctaattctgtatcaataggctgttcccatggtcttgccatgcgcttgaagctgcgggagccttctcactgttcaggctggggtgtggttttcagaaccaccgggttgactactgaaaaccaagtgagccttacagctcttatcgctgggtaaagtgatcttgcctggtgcctcttggtcttcagctcaattttccaggttgtcctggccaagccttgctctgttacgctcagtgcctctgcccactctttccccgccagcccttccctcccgccctgcaaacttgtcccttggctgtttcaccaggttctgcctgtatccttgcctccttggtacacaccatttcaggttcttccctttctgtgtcccattgtcctagttatgttctgttgtttgtgtaatgcccaaatttttctgctcgtgtggccttgaaaagtaggccagcctcagaggctgctgagctgaaaatggaactgagtaatcaggtgagctggaagggatgtggggggcggggcagacgggagacatgggttttgaaggcagtgaacaataaaaccttagggaggtggcaccgaggccttagcatttgaggagctgaaatgtttcagtgttgttttctcaccagccacaagcatcttatgagtttctgtgcaaggaagcgtagagcactgctgtgctgtcaggatgaagaagggctttctgcaggggctggcctttctctacccagaggccaagcaggctgccctgcactgtgtccttggttggtgttgatgcccaaaatagagaaggtgcttgctagcttttccttggtacattttcgggggttgcaaggcaacaagttttcttttgttttgtttgtttgtttctttgtttgtttttgagatggagtctcactctgtcacccaggctggagtgcagtggcgtgatctcagctcactgcaagctccgcctcccgggttcatgccattctcctgcctcagcctcccgagtagctgggactacaggtgcccaccacctcgcctggctaatatttttgtatttttagtagagtctgggtttcactgtgttagccgggatggtctcgatctcctgaacttgtgatccacccacctaggcctcccaaagtgctgggattacaggtgtgagccatcgcgcccggccaacttttctttagaaaaatgagtaaagtaggtaaacttcacaggccccttagaattaaatccttagggcatggttcaagtctgtaggaagcaaatctatacttttttatatgggcttttaagtagagcttagaaccctggggggagaaaagcagtcaggtgaggtttgagattccttctatagaatgatttcttaaaatgaaaatctgggcccacttaactaccctagataaaacgcttcaatggcttcccatggctcactggataacatctaaattcttcatggaattgaaggcccctatgtgctggttttggctaagatctcccctttgatgtgggtcccctgttgattatacgtgcggccttccagctgcccaccatcacagctacagctcgctccccttggcctctgtgccttggctcgcactgttcctactgaaggcctagcacctgctcttggcctggtgagcccctccaccttccaggcttactcaaagaattctttctgcccctccctgtgtcccgggacctgtttcatatcgcttctgtggtcgtgaccccatggtcttgtaattgtgaacttctttgctgccccttcgaagctggggagtgcttgttgcagatgcatccaagaggggtaattgcgtatcaacagtggatttgctggttgtttctacagggttctgaagcatgcaacatagaacagatacctttaaatttaggggcgctaaggaaagcaggaaccagtaatcctcttctgtggtgggatgggagggtgggggagaggggtggaatggagaggaaacaggctattgttggccagccctgggtggaggtgggtgcaagcaggacagatagtgcctgggggtgggggcggagggttcgcctctaggaaggggctagaagggatgaggaaatagttcatagcttcgtgcaggtgatccctattctgcgtgtatgtgtttgcacatgagtgtttgtagaccatagaccattaaaaaatacggaattcaaaagttacaaaaagggtattcttggaaaagaaagttgtttttttttagtcttgctgtgttgcccaggctggacctgaactcctgggcttgagcaagtcttcccctcagcctctggagtagctgggcctacagcgtgtgctgccacacccagctaatacagtctttctactcccgctctctattccccagtttcttgcccagaggcaacccttgccagtctgtttatccctccagatacagtctctgatagtaaacttttctttctcttacacaaatgatagtagtcacatacactacacacactgtgccacgtttaaaaagaaaaaaaacaattctcggctgggcgcggtggcgcatgcctgtaatcccagcactttgggaggccaaggtgggtgaatcacctgaagtcaggagttcgagatcagcatggccaacatggtgaaaccccatctctactaaaaatacaaaaaaaatgagccgggcatggtggtgggtacctgtaatcccagctactcaggaggctgaggcaggagaatcacttgaacccgggaggcaagggttgcagtgagctgagatcgcaccattgcactcccacctgggcaacaaagagtgaaacttggtctcagaaacgaaacaaaacacaaaaacctttctcagtcccagcatatgtggagcagcctcattcttcatagctgtgtgtcattccgttgcgtgatggggtcacagagcacagacctggtgcccttttcctttttaatatgtggaaacccctccatgctttccaaagcctacaagtacagcagccccaagtttagggtgagcagcagtggtcagagctctttactattacttttgggcaaacgcaagccaggctggcaaccaccactgccgccgaggggagatacaagcaggccagttcacactctggacgtttagtttctttctacatctagaaggtggcctctgctatccacttaaagcagcccaaggaactgtcagaaagcgaaagtgatgacatgaaccgcgagtagggcacctccctgtgccgtcgtctgctttccttcctccctcccagcctccctgtgccgtcctctgctttcctccctcccagcacggaaaagccgtggggccgatggactttggcctcacatccacagatggggcctgtgggaattctactgatttactctctggcctagtcaagcaacccacccacggcctggccaaggtcggcctcaccgccctggcctagcacctttggaaactgaatacatggagtgttaaccagaaaaatgtctggcccttttgcctcgctgcctctggaaacctcagtgtttcgggctggtaggaagctacaggacagacagtgggcacggtgcctagcagcctgtcgcgcccccgcccgcctctgcattcctccagcggtggtgtacggatccagacattgtttgccacctctaggcctcttgataaaacagcaagtatttttcttgtcttaaagcaatgcatgtatattttagaaaatattaattgcatagaaggaaatacaggactcgtgatcccaccactcagaaataattactattaatacggttgattttctttcagcttttttccccctaattaattaactaattcttttttttcctgcaactcctgcttcacagactttttttttttttttaacttggcatggtggctcacacctataatcccagcactttgggaggccagagtgggaggattgcttgagcctaggagttcaaagctagcctgggcaacctagtgggaccccatttcttttttttgggggggggggtgggttataaaagcccttttataaagccaattttaaacaagaaaaaaacaaaaagtttacaaaagaaaaaaagatacagaaaaagaataacttgcttcatatgtcccaaaaacagaaaaaaataaacgggacaatgccaacatgctcaacaataaagggttctttttcttacttttttaatacaaaatacaagcaaaggatacacatacttaaaacagagctcaggagcagacacgcagtcctgggaacccttcaataagagcaaagcaggagtttgttttttctttgtgcagatacatacagagactgggatatgtaaaaattaagtatcacaaaagaccatcacacgattctaccaatgcatgttgcatctataattcacgaacatggtcaacaagatcatgttcacttcaaccccatttcatttaaattaaagaaaaaaacctggccgggcgcggtggctcacgcctgtaatcccagcaccttgggaagccgaggcaggtggatcacgaggtcaggagatcgagaccatcctggctaacacggtgaaatcccatctctactaaaaaaatacaaaaaattagccgggcgtggtggcgggtgcctgtagccccagctactcgggaggctgaggcagaagaatggcgtgaacccaggaggcggagcttgcagtgagcctagatggcgccactgcactctagcctgggggacagagcaagactccgtcttaaaaaaaaaaaaaaacaaaaataaaccttttaaataaagtggttacattctaactttaacttccttagtaccatgctgcaggtttcagcactgttaaggtattgcaagaatgcccaaccctctggtgtctgattgtgtatctagcaacattgcagtatgaagaaaagagatgccccgggtacgaccccatttctattaaaaataaatgtaaacacccaaccctcttggcagcccatgcacttgagaacctgtagaaaatggcagtgtgcaaccagcatggctgcgagctcagcgtcttcactagagagagtggaggtggttaggaaagggcaggcgggaaggggccatgttggccggacaactgcaggtgaagatgggattgtgaagtacagtccaaggcccactcaccaagggctggatccaaatatgtggggttgggattctgtgacctacttccaattttaatattgacctgagctcatatttagctctacatgtttcccagctcgtattttccaacagcccctttaaaacttttagcatcctcttgtcacttttgtactatccaaggtgggacggacaggtg

SEQ ID NO: 2397 - DNA, 1745 bp, Homo sapiens
cctgcactgtgtccttggttggtgttgatgcccaaaatagagaaggtgcttgctagcttttccttggtacattttcgggggttgcaaggcaacaagttttcttttgttttgtttgtttgtttgtttgtttgtttttgagatggagtctcactctgtcacccaggctggagtgcagtggcgtgatctcagctcactgcaagctccgcctcccgggttcatgccattctcctgcctcagcctcccgagtagctgggactacaggtgcccaccacctcgcctggctaatatttttgtatttttagtagagtctgggtttcactgtgttagccgggatggtctcgatctcctgaacttgtgatccacccacctaggcctcccaaagtgctgggattacaggtgtgagccatcgcgcccggccaacttttctttagaaaaatgagtaaagtaggtaaacttcacaggccccttagaattaaatccttagggcatggttcaagtctgtaggaagcaaatctatacttttttatatgggcttttaagtagagcttagaaccctggggggagaaaagcagtcaggtgaggtttgagattccttctatagaatgatttcttaaaatgaaaatctgggcccacttaactaccctagataaaacgcttcaatggcttcccatggctcactggataacatctaaattcttcatggaattgaaggcccctatgtgctggttttggctaagatctcccctttgatgtgggtcccctgttgattatacgtgcggccttccagctgcccaccatcacagctacagctcgctccccttggcctctgtgccttggctcgcactgttcctactgaaggcctagcacctgctcttggcctggtgagcccctccaccttccaggcttactcaaagaattctttctgcccctccctgtgtcccgggacctgtttcatatcgcttctgtggtcgtgaccccatggtcttgtaattgtgaacttctttgctgccccttcgaagctggggagtgcttgttgcagatgcatccaagaggggtaattgcgtatcaacagtggatttgctggttgtttctacagggttctgaagcatgcaacatagaacagatacctttaaatttaggggcgctaaggaaagcaggaaccagtaatcctcttctgtggtgggatgggagggtgggggagaggggtggaatggagaggaaacaggctattgttggccagccctgggtggaggtgggtgcaagcaggacagatagtgcctgggggtgggggcggagggttcgcctctaggaaggggctagaagggatgaggaaatagttcatagcttcgtgcaggtgatccctattctgcgtgtatgtgtttgcacatgagtgtttgtagaccatagaccattaaaaaatacggaattcaaaagttacaaaaagggtattcttggaaaagaaagttgtttttttttagtcttgctgtgttgcccaggctggacctgaactcctgggcttgagcaagtcttcccctcagcctctggagtagctgggcctacagtgtgtgctgccacacccagctaatacagtctttctactcccgctctctattccccagtttcttgcccagaggcaacccttgccagtctgtttatccctccagatacagtctctgatagtaaacttttctttctcttacacaaatgatagtagtcacatacactacacacactgtgccacgttt

SEQ ID NO: 2398 - DNA, 16774 bp, Homo sapiens
ccggagcctctggggaggcggtcactccgacgtctgaggacctgggccttggacccggactcgttatgaagagcgattcttcgacctctgcagcccccctcagggggctcgggggacccctgcgcagcagcgagccggtgcgcgcggtcccggcccgggcgccggccgtggaccttctggaggaggcggccgacctcctggtggtgcacctggacttccgggcggcgctggagacctgcgagcgggcctggcagagtctggccaaccacgccgtggcagaggaacccgcgggcacgtacgtgctgggctcggaaatgaaccgatttccgggcgctcttgtggtggggctcaaggtctcaggagttctgtccttcccagattgcccacaaggagctttacacctcgctttcatcagtggtttgtctccgagagggtggtcgctcatcgtgtgcccattctacagagaagggaagtcgtgtaacaaaaacttagtggggatcccacagccaattatttgctccttgttccaaggtacaatgacatgatgggaaggctgaatgtgtattaagtgctaagttctgtcagtaagcaggtggtaaaagtcctctcccaggtacctccgccctccccgccccgcccaaggttgtttattcctgaccttggctgatgatggggaatgggggtcatggcaggagcagcgttctggtccaattagaggactggattaaagaattaattcagggccgggagctggggcttacgcctgtaatcccagcactttgggaggccgaggcaggaggattgcttgagcccaggagttcgagaccagcctgggtaacataatgagccctcttctctaccaaaaagaagaaaaagaaaagaatccggagaaaaaaaccttgggcttgcattgctctttctaatgccaccagcctcgtctggcaggtgagggagtcatttctttgcattgtaaacttgggttaggccacgctagggaggtggtaggtagaatagctaaagttgaccacaaagaaggatgatctggagagccctggctgtgttttaggggactgggtgggagctcatttcagtgaatgcagaaggctttgcttctgggtgtctggaggaaccttactaggtggtgccttttagccagctatggagtctatacctccactcagccagaaaccttgctccaagcccatttgttcacagagcaaactcttagttccagctctcttttcagccacacaccggtgctgtgtgttatttccccctcaggattacccttcctcttcatttaaatctgatttcacctggatacaaagatgaacgttgagcaacagctgacttgcctcttgaaagagggttacaggaacttttagttcctgggggaaagggcagcccatgagaccaattgtgaagcccatctaaatactaacagggatgagagagatgatggctgctgagttgggagctggagaggaacagtcccaaggtggaggtgggaatggaaatggaggggaaccacttctaactgaaattggtttttctgctgacagctcattggaggtgaagtgctccctgtgtgttgtggggatccaggccctggcagaaatggatcggtggcaagaagtcctctcctgggtccttcagtattaccaggtccctgaaaagctaccccccaaagtcctggagctgtggtaagtcttctttgctgactcatcagatcggttcagaaacgagaggattttcatctcctctcctaaatacctactcttttccccttccctactattgccctccagatcggattctttcccttcacttttttttccccagacttccatacatagcaataaagaataagggggaggaatttaggagtagaatagatataaagaagggaggaaacagggaataggagcgacgtgggatgacagagtggacagagctgaaagagcagcttgctacgtcctaggaattcctaattcttaaaaaaaaattttgttttgttttgttttgttttgttttttgagacggagtctcgccctgtcgcccaggttggagtgcagtggcacagtctctgctcactgcaagctccacctcccgggttcacaccattctcctgcctcagcctcccgagtagctgggactacaggcgcctgccaccacgcccggctaatttttttgtgttttaagtagagacagggttttaccgtgttagccaggatggtctcaatctcctgacctcgtgatccacctgcctcggcatcccaaagtgctgggattacagatgtgagccatcgcccctggccaaaaaataacaaagtttttaaaattgacacttgtacatatttatggggtaaattagacatttcaatatatgctgtgtatatgttgtataatgatcaaatcagggtagttagcatatccatcacctcatgcatttatcatttgtttgtgacaggaacattcaaaagcctctcttccggctattttatatatacaataccttactgttaaccataaccaccctaccgtgcaatagaacaccacaacttattcctcctatcccaccgtaactttgtacccattgacgaacctcttcccgtcttccttttcttccttcctttcccagtctctggtaaccaccgttctaccgtctgcttctatgatatcaacttttttttttttttaaagattcacatgagtgaaatcatgtagtatttatctttctgtgcctggcttatttcacttaacatgatgtcccccaggtccacctgtgttgtcatgaatgacaagatttcattcttttttatggctatatagtattccattatatatatatatatatatatatatgcgtgtgtgtatatatatacacatatataaacacatatatacacataatatacatatatgtacacatatacacacacacacacacacacacacacacacacacattatccattcatctgttgttggacacttaggttgattccatatcttggctgttgtgaatagtgctgcattaaacaggggagataatggattgctagatcatgtggtagttctatttttatttttttcacctggccattcttaagtttattttgatgacacccggtgacagttccctgtacctagaagaaggtgttgggactcttgatgttggagtgtggcttgtgctgaagacacaggacctggtagggcagcaggaacttgatcttggaattgtggaactgcttgactgtcggccggtggcagtaccagaagcgggacttggcacaacttgcttaggtgcagagatttgctggcagtagaggggcagcatgtggcatttgggggtgggcaggcagcaaatactctctcagtgtgccccaggccttcatggcattctctcagcacttgccaccacttacaaaaaggaagtgccgtctttcctattttgaattttttaaaggaacctgcattctgttttccataatggctgtactaatttacagtcccaccaacagtgtgtaagtgctgcctttctccacatcctcacccgcaccaacactcgttttcttttgtctttttgataagagctgttctaactggagcgaggtagtgtctcattgtggttttgattggcatttccctgatgattagtagtgttgagcattttttcatatacctgttggccatggtacgtcgtcttctgagaaatgtctgttgaggtctttttcccttttgaatcaggttttttttttttttttctgctgttaagttcctgatatattctggatattaacgctttgtcagatggatagtttgcaaatattttctcccattctgtaggttgtttcttcactcttaattgcttcctttgctgtgcagaagtttttagtttgatgtcatttcatttgtccatttttgcttttgttaccagtgcttttaaggtcttactgaaaaaaacacttgctcagcccagtgttgtgaggcatttctcctgtgctttcttctagtagtttcatggttttggattttacatttaagtcttgaatccattttgagttaatttttgtatgtggggaaaggtaggggtctggtctcctgcatatggatatccgattttcccagcaccatttattaaagagactgtcttttcccctgtgtgtgttcttggcacctttgttgaaaatcagttggctgtaggtgcatgaatttatttctgggctctctgttctgttctattttgtctgtttttatgccataacatgctgttatggttactgttatagctttgtgtagtatggtttgaagtcaggtaatatgatacctccagctttgttctttttgctcacaactgctttagccatttggggtcttttgtggttccatacgaatttcaggattgttttttctgtttctgaagaatgccattggtgttttgatagggattgcattaaatctgtaaattgctttgggtattttaataatattcttccaatttgtgaatgaacacgggatatctttccattttttgtgtgtccccttcaacttctttcatcaatgttttatagttttcagtgtagagatcttttgccagcttggtttaatttattcctaggtatcttatttttttggtagctattgtaaatcgaattgttttcttgatctcttttccaatggttcactgtcacgtatagaaacgctgttttttgtacattgatttttgtatcccacaactttactgaatccgtttattagttctgtctgcaaacagggataacttgacttcctcctttccaatttggataccttttatttctttctgttgcccgattgctctggctatgacctccagtactatgttgaataaaaacggtcaaagtaggcatctttgtcttgctcctgatcttagaggaaaggctttcagcttttcccattgattatgctgttagtgatgggtgtgtcgtggggaattcccatgagcatcatcatttcatcggaaagggctcgaggacacagtgaggaggggctggataggagaagcatagtggtcatgggaaatgaaccaatcattgagcactgactcttcttttgttgggattgggttttttggggactgcagcattcttttatacagcaaaatgcaagagcctggagctgtgctggatgtggtgggtgcctggctccaagacccagccaatcaaaaccttccagaatatggagccttggcagaatttcacgtgcagcgggtgctgctgcctctgggctgcttatcggaggctgaggagctagtggtgggctctgcagcctttggtgaggagcggcgactggatgtacttcaggccattcacacagcgaggcagcagcagaaacaggaacactcaggctctgaggaggcccagaagccaaacctggaaggtaggacattatccctctgcgacctctgtaaagtggacttgcgggcttgcactgtacctcggggtctgtcgtgaaactcctgcgagcttagaagcagttctttgtatgaataactcttgagtcacagaataggaggcctgttgatttgcttcacaaagtgaaggccagaccctctgaagttggcagtggaaggagaatctccacatgggaaggtgttgctgggtcttgggaccttgacttgtcttttgaaagtcattttcccattggagtcctctgatgaggtctcttgcttccaccatactggtctgggtgggatgtccttcctcctttaaatgctggccccaatacagacacagctgagatctgctgggatagccaaaggaatatcagaaactaatttgcagaccctttccctggtcgctgaatcttttccgcccttttccttgagtgatgatctagtctagttgtgaatacttcaaggacagaaagtcaccatctctctctctttttttttttttttttttttgtttgagacggagtctcgctctgtcgcccaagcgggaatgcagtgatgcgatctccgctcactgcaagctgcacctctcaggttcacgccattctcctgcctcagcctcctgagtagctgggactacaggtgcccgccaccacacctggctaatttttgtatttttagtagagacggggtttcaccgtgttagccaggatggtctcaatctcctgacctcgtgatctggctgccttggcctcccaaagtgctgggattactggcatgagccactgcgcctggcctgaaaggttctgaaaggttttaaaaaacttttacaaagatgcattcaatatagtaaataatatatagtcaaaataagtaataaacacgaggaaaacaatttatattcatgagatttgcaagagtatgtgcagttaaggaatgaaggctttagccaatacctaatacccttttactaaactcttttttttttttttttgagacggagttttgctcttgttgcccaagctggagtgcaatggcacgatcttggctcactgcagcctccacctcccagattcaagtgattctcgtgcctcaggctcccaagtagctgggactacaggcgcacaccaccacgcctggctaatttttgtatttttagtagagacggggtttcaccatgttagccaggatggtctcgatctcctgaccttgtgatccacctgcctcagcctcccaaagtgctgggattacaggcatgagccactgcgcctggcctgctcaggtcttagaagcaagcacagaggtcggggtcagggaagctgattcccatgacatccctgaagctgtgctctgtctccctggccaggctctgtctcccacaagttcctgtcactaccgatgttggttcgccagctttgggactctgcggtgagccacttcttttctctgcccttcaaaaagagtctcctggctgccttgatcctctgtctcctggtggtgagatttgatccaggtaagaggtggagactctcccctgtccttcctgggaaggggttgttgccagggctgggcctgtgggagtgggtgtttgtcagagtcctactggggaggggagtctctcctatgacatttcccctgagtctgttccacaaggaggaattgctagactgggcatgagccagccccacccataaggagaggccagtcctggagtctatgagagcagccaggagaaagtccacttggccctgctgactcctgaacatggactgagtcatagtcctccactttttctagggctgaactctgactagaacctcagaatttaaaaaaacttcctcttggccaggcacggtggctcacgcctgtaatcccagcactttgggaggccaaggcaggcagatcacaaggtcaggaaatcgagaccagcctggccaacatggtaaagccccatctctactaaagatacaaaaaaaattagccaggtgtagtggcacatgcctgtagtcccagctacttgggaggttgaggcaggagaatagcttgaacccgggaggcggaggttgcagtgagccaagatcgcactgctgcactccagcctgggcaatagagcgagactctgtctcaaaacaaaaaacaaaaaacaaaaaaacttccgctcatcagaatatctacaaaagtgttaattcaagtattaatgtctcatgaagtgttaattcaaagcaagttgtaaatgaaaaactcatacattttagaaaatgtggaaaataggccggacatggtggctcacacctgtaatcccagcactatgggaggccaaggagggtggatcacctgaggtcaggagttcgagaacagcctggccaatatggtgaaaccccgtctctactaaaaatacaaaaattagccaggtgtggtggtgcgtgcctgtaatcccagcaactggggagggtgaggcagggagcattgcttgaacccaggaggcggaggttgcagtgagccaagattgcactgttgccctctggcctgggctacaagagcgaaactctgtctcaaaaaagaaaaaaaaatgtggaaaatagagaaaagtataaagaagggcatagaaatctgctactctgctgtgctttcagtctttttctatggatatagagattgtaggcagttacatgtcacacatatgctttcaagcatggccttaaatcgctaactattccagttcacaggaatgcccctaagtaatttaacaacccctattattgaacatttgggtgattattctgttttctgcctcgctgtgaagaaggaatgagctccctaagtgatatttgggaacaaccccagttatttcctgaggattgacccctcaggtgcatgaagccaaacttggcactcgctcttttagatttttttgtgttactcagtgtgagttatgttctaatctctactcttctcatgaatttagacttagaatatgattaaataagtttcaaaatttaagaggaaatcagaaacccttatactggtcccttcaaatggtttgtctattttgagaagtgccatttgttaacttagtctttagattctccctgtttccccatttctctttctcttattcagtgagcttttttaaaatatttatttatttatttttatttttattttattttatttatttagtttttgatactgggtctttctctgttgcccaggctggagtgcaccggcgtgatcttggctcactgcaacctctgcctcctaggctcaagcgatcttctctcctcagcctcccaagtaactgggactacaggcatgtgcctccatgcccggctaattttttatttttatttttgagacagagtcttgctctgttgcccaggttgcagtggcgtgatctcggcttactgcaacctccgcctcctgggttcaagcgattctcctgcctcagtatcccaagtagctgggattacaggcacacaccaccatgccaggctacattttgtatttttagtagagacggggtttcgccatgtttgccaggctggtctccaacttctggccttaagtgatcctctcacctcagcctcccacagtgctgggattataggcacaagccatcatgcctggccagcgaggtttccgtcacatagctcagagttgtccttctaacccgtctgctgaatgctgagcagggatcccctgtggacgactctgtttgctttacaaagaagtcacgagttagcgctcggaatgctcagtatcatcagcgttcatccctggccacctcctgactgatacagatttagaaactctttatgattctttatggttcccgtaagccctttagtctcgtaaaccctggtctcctagtggggatggcatgaggacatttgagcctgctctttccaaggctgcttcagaagggcctggcccagtggccctgaccctcagcagcaggcccgactcattggagtgatgatggtgggggaggagaacctgcacctgcaggctgaggatcgcatgagccccagagattgaggctgcagtgagctgaacacagactgcactgtactctagcctaggtgacagagcgagaccctgtctctaaaaaaaacaaaacaaaaccaactatgtgtaattggtagtggagtctcccagggtgggagatggcagagtgacaggtgagaggggtgggacgttcactgtagtctccctctgccctgcagcttccccttcctccctgcacttcctctacaagctggcccagctcttccgctggatccggaaggctgcattttctcgcctctaccagctccgcatccgtgactgagggtccctgcgcaccacagcctctctgctcctcacgtccgtggccacagaagcagagcgacagagcgacacatccacaggcgcccctggggaaatgggaccagcctaatctcgcggagtgcactgtgtcttgctgcctgggtgccctctcctttgcaccctacttcggctggtcgcggtagatgatgtggaaacaaagcaggaccagcaggcacagcacctccagaacagtgccccggatgaccagaggccccttgaaaaggaggggtttggggacagggactgtgtccatgaaacattccatcttcttggtgaaggcaaggggttggttcttcaggtcaggatgttaatggagctggaagttcagaaaaagcctggtgaagtgacccttggcctttcacttcttgagaaacatacttctttgctgggcatggtgactcacgcctgtaatcccagcactttggaagggtgaggtgggtggatcacttgtggccaggagttcaaaacctgcctggccaacatggtgaaaccccatctctactaaaaatacaaaaattagctagatgtggtgcacgcctatagtcctagctacttgggaggctgaggcaggagaatcacttgagccagggaggcaaaagttgcagtgagctgagattgtgctaccgcactctctcaaaacaaacaaaaaaacatgccccacaggacagtaccttaattagctagagtagatctgagagggcctcttcttgcctgcactgtgctccccagagctgatctaattctgtatcaataggctgttcccatggtcttgccatgcgcttgaagctgcaggagccttctcactgttcaggctggggtgtggttttcagaaccaccgggttgactactgaaaaccaagtgagccttacagctcttatcgctgggtaaagtgatcttgcctggtgcctcttggtcttcagctcaattttccaggttgtcctggccaagtcttgctctgttacgctcagtgcctctgcccactctttccccgccagcccttccctcccgccctgcaaacttgtcccttggctgtttcaccaggttctgcctgtatccttgcctccttggtacacaccatttcaggttcttccctttctgtgtcccattgtcctagttatgttctgttgtttgtgtaatgcccaaatttttctgctcgtgtggccttgaaaagtaggccagcctcagaggctgctgagctgaaaatggaactgagtaatcaggtgagctggaagggatgtggggggcggggcagacgggagacatgggttttgaaggcagtgaacaataaaaccttagggaggtggcaccgaggccttagcatttgaggagctgaaatgtttcagtgttgttttctcaccagccacaagcatcttatgagtttctgtgcaaggaagcgtagagcactgctgtgctgtcaggatgaagaagggctttctgcaggggctggcctttctctacccagaggccaagcaggctgccctgcactgtgtccttggtgttgatgcccaaaatagagaaggtgcttgctagcttttccttggtacattttcgggggttgcaaggcaacaagttttcttttgttttgtttgtttgtttgtttgtttgtttttgagatggagtctctgtcacccaggctggagtgcagtggcgtgatctcagctcactgcaagctccgcctcccgggttcatgccattctcctgcctcagcctcccgagtagctgggactacaggtgcccaccacctcgcctggctaatatttttgtatttttagtagagtctgggtttcactgtgttagccgggatggtctcgatctcctgaacttgtgatccacccacctaggcctcccaaagtgctgggattacaggtgtgagccatcgcgcccggccaacttttctttagaaaaatgagtaaagtaggtaaacttcacaggccccttagaattaaatccttagggcatggttcaagtctgtaggaagcaaatctatacttttttatatgggcttttaagtaaagcttagaaccctggggggagaaaagcagtcaggtgaggtttgagattccttctatagaatgatttcttaaaatgaaaatctgggcccacttaactaccctagataaaacgcttcaatggcttcccatggctcactggataacatctaaattcttcatggaattgaaggcccctatgtgctggttttggctaagatctcccctttgatgtgggtcccctgttgattatatgtgcggccttccagctgcccaccatcacagctacagctcgctccccttggcctctgtgccttggctcgcactgttcctactgaaggcctagcacctgctcttggcctggtgagcccctccaccttccaggcttactcaaagaattctttctgcccctccctgtgtcccgggacctgtttcatatcgcttctgtggtcgtgaccccatggtcttgtaattgtgaacttctttgctgccccttcgaagctggggagtgcttgttgcagatgcatccaagaggggtaattgcgtatcaacagtggatttgctggttgtttctacagggttctgaagcatgcaacatagaacagatacctttaaatttaggggcgctaaggaaagcaggaaccagtaatcctcttctgtggtgggatgggagggtgggggagaggggtggaatggagaggaaacaggctattgttggccagccctgggtggaggtgggtgcaagcaggacagatagtgcctgggggtgggggcggagggttcgcctctaggaaggggctagaagggatgaggaaatagttcatagcttcgtgcaggtgatccctattctgcgtgtatgtgtttgcacatgagtgtttgtagaccatagaccattaaaaaatacggaattcaaaagttacaaaaagggtattcttggaaaagaaagttgtttttttttagtcttgctgtgttgcccaggctggacctgaactcctgggcttgagcaagtcttcccctcagcctctggagtagctgggcctacagtgtgtgctgccacacccagctaatacagtctttctactcccgctctctattccccagtttcttgcccagaggcaacccttgccagtctgtttatccctccagatacagtctctgatagtaaacttttctttctcttacacaaatgatagtagtcacatacactacacacactgtgccacgtttaaaaagaaaaaaaacaattctcggctgggcgcggtggcgcatgcctgtaatcccagcactttgggaggccaaggtgggtgaatcacctgaagtcaggagttcgagatcagcatggccaacatggtgaaaccccatctctactaaaaatacaaaaaaaaaatgagccgggcatggtggtgggtacctgtaatcccagctactcaggaggctgaggcaggagaatcacttgaacccgggaggcaagggttgcagtgagctgagatcgcgccattgcactcccacctgggcaacaaagagtgaaacttggtctcagaaacgaaacaaaacacaaaaacctttctcagtcccagcatatgtggagcagcctcattcttcatagctgtgtgtcattccgttgcgtgatggggtcacagagcacagacctggtgcccttttcctttttaatatgtggaaacccctccatgctttccaaagcctacaagtacagcagccccaagtttagggtgagcagcagtggtcagagctctttactattacttttgggcaaacgcaagccaggctggcaaccaccactgccgccgaggggagatacaagcaggccagttcacactctggacgttcagtttctttctacatctagaaggtggcctctgctatccacttaaagcagcccaaggaactgtcagaaagcgaaagtgatgacatgaaccgcgagtagggcacctccctgtgccgtcgtctgctttccttcctccctcccagcctccctgtgccgtcctctgctttcctccctcccagcacggaaaagccgtggggccgatggactttggcctcacatccacagatggggcctgtgggaattctactgatttactctctggcctagtcaagcaacccacccacggcctggccaaggtcggcctcaccgccctggcctagcacctttggaaactgaatacatggagtgttaaccagaaaaatgtctggcccttttgcctcgctgcctctggaaacctcagtgtttcgggctggtaggaagctacaggacagacagtgggcacggtgcctagcagcctgtcgcgcccccgcccgcctctgcattcctccagcggtggtgtacggatccagacattgtttgccacctctaggcctcttgataaaacagcaagtatttttcttgtcttaaagcaatgcatgtatattttagaaaatattaattgcatagaaggaaatacaggactcgtgatcccaccactcagaaataattactattaatacggttgattttctttcagcttttttccccctaattaattaactaattcttttttttcctgcaactcctgcttcacagactttttttttttttttaacttggcatggtggctcacacctataatcccagcactttgggaggccagagtgggaggattgcttgagcctaggagttcaaagctagcctgggcaacctagtgggaccccatttcttttttttggggggggggtgggttataaaagcccttttataaagccaattttaaacaagaaaaaaacaaaaagtttacaaaagaaaaaaagatacagaaaaagaataacttgcttcatatgtcccaaaaagagaaaaaaataaacgggacaatgccaacatgctcaacaataaagggttctttttcttacttttttaatacaaaatacaagcaaaggatacacatacttaaaacagagctcaggagcagacacgcagtcctgggaacccttcaataagagcaaagcaggagtttgttttttctttgtgcagatacatacagagactgggatatgtaaaaattaagtatcacaaaagaccatcacacgattctaccaatgcatgttgcatctataattcacgaacatggtcaacaagatcatgttcacttcaaccccatttcatttaaattaaagaaaaaaacctggccgggcgcggtggctcacgcctgtaatcccagcaccttgggaagccgaggcaggtggatcacgaggtcaggagatcgagaccatcctggctaacacggtgaaatcccatctctactaaaaaaatacaaaaaattagccgggcgtggtggcgggtgcctgtagccccagctactcgggaggctgaggcagaagaatggcgtgaacccaggaggcggagcttgcagtgagcctagatggcgccactgcactccagcctgggggacagagcaagactccgtcttaaaaaaaaaaaaaacaaaaataaaccttttaaataaagtggttacattctaactttaacttccttagtaccatgctgcaggtttcagcactgttaaggtattgcaagaatgcccaaccctctggtgtctgattgtgtatctagcaacattgcagtatgaagaaaagagatgccccgggtacgaccccatttctattaaaaataaatgtaaacacccaaccctcttggcagcccatgcacttgagaacctgtagaaaatggcagtgtgcaaccagcatggctgcgagctcagcgtcttcactagagagagtggaggtggttaggaaagggcaggcgggaaggggccatgttggccggacaactgcaggtgaagatgggattgtgaagtacagtccaaggcccactcaccaagggctggatccaaatatgtggggttgggattctgtgacctacttccaattttaatattgacctgagctcatatttagctctacatgtttcccagctcgtattttccaacagcccctttaaaacttttagcatcctcttgtcacttttgtactatccaaggtgggacggacaggtgtcagataatagcagagacttggtgaagaaatgaaagcacttttgtagaagagtgtcatttcagaaaaaagccttttttttttgagatggagtctcgctctgtcacccaggctggaatgcagtggcgtgatctcagctcactgcaagctccgcctcctgggttcacaccattctcctgcctcagcctcccgagtggctgggactataggcgcccgccaccacgcctggctaattttttggtatttttagtagagactgggtttcaccgtgttagccaggatggtctcgatctcctgacctcgtgatccgcctcccacagtgctgggattacaggcgtgagccacggcacctggagagaaaaaagcttctttaatgacgacctcaacataatttacatggagaagtttcttaggtggaaaaccgatttgtatggtcctcagaatgtaacctacaggttcttgccctcagaaaaatgcatgcatacttttatgttacaggcttattttccaaatgcggtagagggccatcccttctttggcttcttgccttgtctctgaccccactgactgccccttttctgcctccatagctagtttcttattttcctttggctttttttttcttttcttttcttttcttctttttttttttgagatggaatcttgctcttgtcacctaggctggagtgcagtggtgcgatctcggctcactgcaccctcctcttgggttcaagccagcgaggtagatattatcattttagagacagcaaaacagactcagaggggctaatgtgcccagtgccccaccgcttttaaatggtagagctgggatttgaatctaggcatacaggtaccaggatttctgttcttatctcccccatagcacctggaatgaggccatccatgtaagaggccaagtaataaagatttgttgaatgaa

SEQ ID NO: 2399 - DNA, 287 bp, Homo sapiens
ggcgagcgcaaagatgtccgcgcccgctgccgggaggcgaggtgagtctttgatcgtaaccaggagcccggagctgaggcagttcctgcacgtgtcgcggggccggagaagctagggccaggtattccagggatgcaagaatcctgcaaatctgacgtgtaaactgcttccccagcctccaggcgagcccagcttttgcctcagataggccccttccttttccttctcggggaatcgacctcgggaaggggtgtgggcaaagagatgaggactctccctcttcgccc

SEQ ID NO: 2400 - DNA, 297 bp, Homo sapiens
ttttttttttttttttgagatggagtctcgctctgtcgcccaggctggagtgcagtggcacgatctcagctcactgcaagctctgcctcccaggttcatgccattcttctgcctcagcctcccgaatagctgggactacaggcgcccgccaccacacccggctaattttttgtatttttagtagagatggggtttcaccgtgttagccaggatggtctcgatctcctgaccttgtgatctgcccacctcggcctcccaaagtgctgggattacaggcgtgagccaccacgcccggcc

SEQ ID NO: 2401 - DNA, 287 bp, Homo sapiens; identical to SEQ ID NO: 2399

SEQ ID NO: 2402 - DNA, 802 bp, Homo sapiens
tcactgcaagctccgcctcctgggttcacaccattctcctgcctcagcctcccgagtggctgggactataggcgcccgccaccacgcctggctaattttttggtatttttagtagagactgggtttcaccgtgttagccaggatggtctcgatctcctgacctcgtgatccgcctcccacagtgctgggattacaggcgtgagccacggcacctggagagaaaaaagcttctttaatgacgacctcaacataatttacatggagaagtttcttaggtggaaaaccgatctgtatggtcctcagaatgtaacctacaggttcttgccctcagaaaaatgcatgcatacttttatgttacaggcttattttccaaatgcggtagagggccatcccttctttggcttcttgccttgtctctgaccccactgactgccccttttctgcctccatagctagtttcttattttcctttggctttttttttcttttcttttcttttcttctttttttttttgagatggaatcttgctcttgtcacctaggctggagtgcagtggtgcgatctcggctcactgcaccctcctcttgggttcaagccagcgaggtagatattatcattttagagacagcaaaacagactcagaggggctaatgtgcccagtgccccaccgcttttaaatggtagagctgggatttgaatctaggcatacaggtaccaggatttctgttcttatctcccccatagcacctggaatgaggccatccatgtaagaggccaagtaataaagatttgttgaatgaa

SEQ ID NO: 2403 - DNA, 687 bp, Homo sapiens
ccgcactctctcaaaacaaacaaaaaaacatgccccacaggacagtaccttaattagctagagtagatctgagagggcctcttcttgcctgcactgtgctccccagagctgatctaattctgtatcaataggctgttcccatggtcttgccatgcgcttgaagctgcgggagccttctcactgttcaggctggggtgtggttttcagaaccaccgggttgactactgaaaaccaagtgagccttacagctcttatcgctgggtaaagtgatcttgcctggtgcctcttggtcttcagctcaattttccaggttgtcctggccaagccttgctctgttacgctcagtgcctctgcccactctttccccgccagcccttccctcccgccctgcaaacttgtcccttggctgtttcaccaggttctgcctgtatccttgcctccttggtacacaccatttcaggttcttccctttctgtgtcccattgtcctagttatgttctgttgtttgtgtaatgcccaaatttttctgctcgtgtggccttgaaaagtaggccagcctcagaggctgctgagctgaaaatggaactgagtaatcaggtgagcaggaagggatgtggggggcggggcagacgggagacatgggttttgaaggcagtgaacaataaaaccttagggaggtggcaccga

SEQ ID NO: 2404 - DNA, 2132 bp, Homo sapiens
gtgagctgagatcgcaccattgcactcccacctgggcaacaaagagtgaaacttggtctcagaaacgaaacaaaacacaaaaacctttctcagtcccagcatatgtggagcagcctcattcttcatagctgtgtgtcattccgttgcgtgatggggtcacagagcacagacctggtgcccttttcctttttaatatgtggaaacccctccatgctttccaaagcctacaagtacagcagccccaagtttagggtgagcagcagtggtcagagctctttactattacttttgggcaaacgcaagccaggctggcaaccaccactgccgccgaggggagatacaagcaggccagttcacactctggacgtttagtttctttctacatctagaaggtggcctctgctatccacttaaagcagcccaaggaactgtcagaaagcgaaagtgatgacatgaaccgcgagtagggcacctccctgtgccgtcgtctgctttccttcctccctcccagcctccctgtgccgtcctctgctttcctccctcccagcacggaaaagccgtggggccgatggactttggcctcacatccacagatggggcctgtgggaattctactgatttactctctggcctagtcaagcaacccacccacggcctggccaaggtcggcctcaccgccctggcctagcacctttggaaactgaatacatggagtgttaaccagaaaaatgtctggcccttttgcctcgctgcctctggaaacctcagtgtttcgggctggtaggaagctacaggacagacagtgggcacggtgcctagcagcctgtcgcgcccccgcccgcctctgcattcctccagcggtggtgtacggatccagacattgtttgccacctctaggcctcttgataaaacagcaagtatttttcttgtcttaaagcaatgcatgtatattttagaaaatattaattgcatagaaggaaatacaggactcgtgatcccaccactcagaaataattactattaatacggttgattttctttcagcttttttccccctaattaattaactaattcttttttttcctgcaactcctgcttcacagacttttttttttttttttaacttggcatggtggctcacacctataatcccagcactttgggaggccagagtgggaggattgcttgagcctaggagttcaaagctagcctgggcaacctagtgggaccccatttctttttttggggggggggtgggttataaaagcccttttataaagccaattttaaacaagaaaaaaacaaaaagtttacaaaagaaaaaaagatacagaaaaagaataacttgcttcatatgtcccaaaaagagaaaaaaataaacgggacaatgccaacatgctcaacaataaagggttctttttcttacttttttaatacaaaatacaagcaaaggatacacatacttaaaacagagctcaggagcagacacgcagtcctgggaacccttcaataagagcaaagcaggagtttgttttttctttgtgcagatacatacagagactgggatatgtaaaaattaagtatcacaaaagaccatcacacgattctaccaatgcatgttgcatctataattcacgaacatggtcaacaagatcatgttcacttcaaccccatttcatttaaattaaagaaaaaaacctggccgggcgcggtggctcacgcctgtaatcccagcaccttgggaagccgaggcaggtggatcacgaggtcaggagatcgagaccatcctggctaacacggtgaaatcccatctctactaaaaaaatacaaaaaattagccgggcgtggtggcgggtgcctgtagccccagctactcgggaggctgaggcagaagaatggcgtgaacccaggaggcggagcttgcagtgagcctagatggcgccactgcactccagcctgggggacagagcaagactccgtcttaaaaaaaaaaaaaaacaaaaataaaccttttaaataaagtggttacattctaactttaacttccttagtaccatgctgcaggtttcagcactgttaaggtattgcaagaatgcccaaccctctggtgtctgattgtgtatctagcaaca

SEQ ID NO: 2405 - DNA, 287 bp, Homo sapiens; identical to SEQ ID NO: 2399

SEQ ID NO: 2406 - DNA, 304 bp, Homo sapiens
ttttttttttttttttgagatggagtctcgctctgtcgcccaggctggagtgcagtggcacgatctcagctcactgcaagctctgcctcccaggttcatgccattcttctgcctcagcctcccgaatagctgggactacaggcgcccgccaccacacccggctaattttttgtatttttagtagagatggggtttcaccgtgttagccaggatggtctcgatctcctgaccttgtgatctgcccacctcggcctcccaaagtgctgggattacaggcgtgagccaccacgcccggccggctctg

SEQ ID NO: 2407 - DNA, 255 bp, Homo sapiens
cttggggcagatcaattgtctgggtttgatgaatctctgggttcacaattgtgactccatccaacaaacactgaggcagactgctttagtgtcaaatatttgctaccccatccttgcaggcctgtccctaccagttctgcccctttaaaatgatgatccacttcattaacaaccatgtcaatgaaacatgaatggcagtgacttacttccaagcagaaacttaaaagccactgtgtagttccaccttccctcttt

SEQ ID NO: 2408 - DNA, 1355 bp, Homo sapiens
cggtgtctctcatcctgactggggatccagagtaggagggagcctttggtggggtaagtggaatggggcggggtggggggtggccatagacccctcttctcagtaaggccctcatgtgaaggaggcaggggttgggacaagtgctaagtatgcaagactcaagggaagagctgctggagccaggagaagcacctccctcccggcccctctgcccctcctcatagcccagctgcactgactcctcctccaggaagccttctcagcttccccaggggtgggaacctttttgtcctccaggtgtgcttggctgtcctttcttgggctctctctctctctctctcctcatcccacttgagtctgccccctattcaccttgtgaggggaattttccttctactcaatctgaccgaggtcctccaggtcaaggacagcgaggctctcagtcccacttccccttggcacatagaagaggcagtgcgctgaagggacaggtgaaatgattagaccctgcccccaaaccaaggcctggccaattggacagggcatgagacattcagcgtagaggttaaaacgagggccctgggttaggaaccccagctcagttctcagctctgtacccttggaaaattcccttcccatggagctttgtggatgcacaaggacttgcacaaagaaaacattcaatatccaggactataaaattccacaaatgattgtgcttattacattcattatcacgatgattattccagacacaaaggaacagaacgaggcaccaacagcaaggggcaagcagattcaagggccacagaggagatggaggcaaacaccttcccctggtcagaggctgtgcctcagcccttctccctgcatcagtttctccttcagaagcatgggactacctcccatctagttctcgtttctaaacctaggggagatgctatctttgctgcaataatcttagcctacatcttggaatggaaatggccttggtggaaatggtcttcaactcctctggtccaagctcaggccctgtgaccctggaacaatccccttcctggtcctccatgtaggagcaataacattcccttgccagcagcaccagccattctgatgattaaatggtatcggactctgttttccaaactcagtcattcagatgccccctattttatttcttccatgtctgcaaatgattataatatttttaaatgtaggatgagtcctttttattacacatagaaatagctactgtaaatagcaaactctaacactgtgcctaattaggaaataaaggtaaccataaatacagtaaaaatgaaacaatgttattatggtttaacctgatagtgtgg

SEQ ID NO: 2409 - DNA, 1360 bp, Homo sapiens
cggtgtctctcatcctgactggggatccagagtaggagggagcctttggtggggtaagtggaatggggtggggggggggcggggtggcccatagacccctcttctcagtaaggccctcatgtgaaggaggcaggggttgggacaagtgctaagtatgcaagactcaagggaagagctgctggagccaggagaagcacctccctcccggcccctctgcccctcctcatagcccagctgcactgactcctcctccaggaagccttctcagcttccccaggggtgggaacctttttgtcctccaggtgtgcttggctgtcctttcttgggctctctctctctctctctcctcatcccacttgagtctgccccctattcaccttgtgaggggaattttccttctactcaatctgaccgaggtcctccaggtcaaggacagcgaggctctcagtcccacttccccttggcacatagaagaggcagtgcgctgaagggacaggtgaaatgattagaccctgcccccaaaccaaggcctggccaattggacagggcatgagacattcagcgtagaggttaaaacgagggccctgggttaggaaccccagctcagttctcagctctgtacccttggaaaattcccttcccatggagctttgtggatgcacaaggacttgcacaaagaaaacattcaatatccaggactataaaattccacaaatgattgtgcttattacattcattatcacgatgattattccagacacaaaggaacagaacgaggcaccaacagcaaggggcaagcagattcaagggccacagaggagatggaggcaaacaccttcccctggtcagaggctgtgcctcagcccttctccctgcatcagtttctccttcagaagcatgggactacctcccatctagttctcgtttctaaacctaggggagatgctatctttgctgcaataatcttagcctacatcttggaatggaaatggccttggtggaaatggtcttcaactcctctggtccaagctcaggccctgtgaccctggaacaatccccttcctggtcctccatgtaggagcaataacattcccttgccagcagcaccagccattctgatgattaaatggtatcggactctgttttccaaactcagtcattcagatgccccctattttatttcttccatgtctgcaaatgattataatatttttaaatgtaggatgagtcctttttattacacatagaaatagctactgtaaatagcaaactctaacactgtgcctaattaggaaataaaggtaaccataaatacagtaaaaatgaaacaatgttattatggtttaacctgatagtgtgg

SEQ ID NO: 2410 - DNA, 3561 bp, Homo sapiens
caaactgaggctttgtaccccacggtaaataggactgaaagcaaattcacagggagcaactgatccattccacaacagaatgctccctgtcaattcgctttccattctgttgtgtcctgtctcccagcagagactacaaactccccaaaaccacttacccaccagctgcacgtgagaagccaaaggtagtttatgtgaaagggctttggaaataatcacgcaccaagtgaaggcagaggacacaccttgtcagcttagttctcagcagcaaatcatctcttttccaggataaccctccctgattcttattgaaatctctttgctgaccacactaagctcttctctctcaggggcagtgggagccgtggagagtggaatagaccagctgtctgtgacctgcgagggagtccaatgtcggaatcactccccagccaaatgcacggttttaaaaaatctatttatttatttatgtagagaccaggctatgagactggctaatttttcgtatttttggatagagacaggatttcatcgtgttgcccaggctggtcttgaactcctgggctcaagcgatccacctgcctcggcttcccaaagtgctcaggattacaggcgtgagccactgtgcccagccaccaaatgcagttgaaaagagtttctgcaagataattccacagaagaggaaagcagttatctggctgggaataccttagacagaggctgtcctctacacaggctgtcagaactgacctactgacctgcctgctggcatgatagaccagagggaaacactctttccactcttcccagactgagtgtaagagacagacttttttttttttttttgagacggagtctcactctgtcacccaggctggagtgcaatggcaagatctcggctcactgcaacctccacctccccgggttcaaaccattctcctgcctcagcctcccaggtagctgggattacaggctcccgccaccacgcctggctaatttttgtatttttagtagagacagggtttcaccatgttggccgggctggtctcgaactcccaacctcaggtgatccgcctaccttggcctcccaaagggttgggattacaggtgtaagccactgctcccagcctttttttttttttttattagagacaagggctccccatgttgcccaggctgatcttgaactctaggctcaagcgatcctcctgcctgagcctcccaaagtgctaggattacaggcatgagcactgctcccagctctgtttttgtttttttaaggaggtatattttttctgttctctctcagccctgaagaaaggctacccatccccttcagacattcctgaaaatatatgtcatccaacatcaaggccaccacagtgaccactaagcaatgcaagaaggtcctctggggtgccctgagatcttggcagggcaggaagagtgagaaggggctttgcctgctcacctgaaagttcccacccaagccgggcccagaaaacaaaatgaattatctacatggtcatccaatcagccaccaaatggcattacctaggtccatcatcatgtaccaagccacaggtcagacccagggccccccaaattaacaagacacaggcactgtcctcaggaagtggagatctagccaggtcagacccacacacaaataacactgatactagagataatgagattgggaattatgattcagccattcaacctgggcttatgtggcatctacaccacctggccctgatttcagtagtgagcacagttgacagggtcccttcccttcacaggtgagccatgtagtccacaagtggaggtggtcgtaagtgaaaaccacattaccagcatggtaaagggttagaaagagggcaccgggtgggcgagaacatgaagcagggggtgctgatggctaaagaagtaaaggaggggctgggcactgtggttcatgcctataatcccagcactttgggagaccaaggcgggtggatcacctgaggtcaggagttctagaccagcctgggcaacgtggtgaaaccctgtctctactaaaaatacaaaaattagccaggcatggtggtgcacgcctgtagtcccagctacttgggaggctggggcatgagaattgctttaacccggaaggtggagtttgcagtgagccgagatcgtgtcactgcactccagcctgggcgacagagggagactctgtctcaaaaaaaaaaaaaagtcaaggagggtttcccagagtggccacttgattagagacctagcacaggaggaagagatgggcagggagagtgacggggagcagcacagtccctgggagcccgaagtgggtgggcacagggctccctaggagaatggaaggacatctatgagctgtagcccaagaggaagaggtcactggggctagatgcggcagaccctcgcaggctttgggaagggcttcagaattcagcctgagggcaatggggagcccttttgggatattaaacttgagtaagatatgagcatatttgcatcttgaaaaatcattatgggaagatggctgggaagagaggaggagtggcagaagaaagataggttggagacaattgattgctcgatgatataaaatgttaagtaccatgaatgatgctgttaggctggaatgcgccaagcataaaggtggggcatggcatcaaaaggtaggtcaacatattaaataattccatgtattgaaatatccagaaaatatatagacagatctatagagatagaaactggtctgcccaggactaggggttgtctaaggataaggagcttcttttttggatggtgaaataacctaaaatatattgtgccattgtttgcacaactttgtgaatatattaaaaacctgttaattgtactcactaaatgtcctccttctaaattaagctgttcttgacaagaaaaggaaagaaacaaagaaaagaagagaaaaaaggtcaaggtttggtcctgggtgctcaaatggcaggccacagacaggaaacacagttgtgaggaattacaacagcctcccggccagagctggagaggtggagcccaggtcccctctaacaccccttctcctggccaggttggagtcccgccacaggccaccagagcggagcagcgcagcgccctgtctcccagcctgaggtgcagtgctgcatctctggtcagttgggagtctgagatgaagcactgtagctcaggaagagagaagttgttctgcagccatcagcctggaagtggtaagtgctggggggttgtggggggccataacaggaaggacagagtgtttccagactccatactatcagccacttgtgatgctggggaagttcctctacacaagttcccctggtgccacgatctgcttcacgagtctgggcatgtcctgactcctctgtgtaccccagtgtgtccatcttagcatgaggcgttagcatttccccagcaccctgcctctgctttctctttctgagcccatggcagacacagctaatcagtaaaggcatatattcttttttttttgagacacag

SEQ ID NO: 2411 - DNA, 3560 bp, Homo sapiens
caaactgaggctttgtaccccacggtaaataggactgaaagcaaattcacagggagcaactgatccattccacaacagaatgctccctgtcaattcgctttccattctgttgtgtcctgtctcccagcagagactacaaactccccaaaaccacttacccaccagctgcacgtgagaagccaaaggtagtttatgtgaaagggctttggaaataatcacgcaccaagtgaaggcagaggacacaccttgtcagcttagttctcagcagcaaatcatctcttttccaggataaccctccctgattcttattgaaatctctttgctgaccacactaagctcttctctctcaggggcagtgggagccgtggagagtggaatagaccagctgtctgtgacctgcgagggagtccaatgtcggaatcactccccagccaaatgcacggttttaaaaaatctatttatttatttatgtagagaccaggctatgagactggctaatttttcgtatttttggatagagacaggatttcatcgtgttgcccaggctggtcttgaactcctgggctcaagcgatccacctgcctcggcttcccaaagtgctcaggattacaggcgtgagccactgtgcccagccaccaaatgcagttgaaaagagtttctgcaagataattccacagaagaggaaagcagttatctggctgggaataccttagacagaggctgtcctctacacaggctgtcagaactgacctactgacctgcctgctggcatgatagaccagagggaaacactctttccactcttcccagactgagtgtaagagacagacttttttttttttttttgagacggagtctcactctgtcacccaggctggagtgcaatggcaagatctcggctcactgcaacctccacctccccgggttcaaaccattctcctgcctcagcctcccaggtagctgggattacaggctcccgccaccacgcctggctaatttttgtatttttagtagagacagggtttcaccatgttggccgggctggtctcgaactcccaacctcaggtgatccgcctaccttggcctcccaaagggttgggattacaggtgtaagccactgctcccagccttttttttttttttattagagacaagggctccccatgttgcccaggctgatcttgaactctaggctcaagcgatcctcctgcctgagcctcccaaagtgctaggattacaggcatgagcactgctcccagctctgtttttgtttttttaaggaggtatattttttctgttctctctcagccctgaagaaaggctacccatccccttcagacattcctgaaaatatatgtcatccaacatcaaggccaccacagtgaccactaagcaatgcaagaaggtcctctggggtgccctgagatcttggcagggcaggaagagtgagaaggggctttgcctgctcacctgaaagttcccacccaagccgggcccagaaaacaaaatgaattatctacatggtcatccaatcagccaccaaatggcattacctaggtccatcatcatgtaccaagccacaggtcagacccagggccccccaaattaacaagacacaggcactgtcctcaggaagtggagatctagccaggtcagacccacacacaaataacactgatactagagataatgagattgggaattatgattcagccattcaacctgggcttatgtggcatctacaccacctggccctgatttcagtagtgagcacagttgacagggtcccttcccttcacaggtgagccatgtagtccacaagtggaggtggtcgtaagtgaaaaccacattaccagcatggtaaagggttagaaagagggcaccgggtgggtgagaacatgaagcagggggtgctgatggctaaagaagtaaaggaggggctgggcactgtggttcatgcctataatcccagcactttgggagaccaaggcgggtggatcacctgaggtcaggagttctagaccagcctgggcaacgtggtgaaaccctgtctctactaaaaatacaaaaattagccaggcatggtggtgcacgcctgtagtcccagctacttgggaggctggggcatgagaattgctttaacccggaaggtggagtttgcagtgagccgagatcgtgtcactgcactccagcctgggcgacagagggagactctgtctcaaaaaaaaaaaaaagtcaaggagggtttcccagagtggccacttgattagagacctagcacaggaggaagagatgggcagggagagtgacggggagcagcacagtccctgggagcccgaagtgggtgggcacagggctccctaggagaatggaaggacatctatgagctgtagcccaagaggaagaggtcactggggctagatgcggcagaccctcgcaggctttgggaagggcttcagaattcagcctgaggacaatggggagcccttttgggatattaaacttgagtaagatatgagcatatttgcatcttgaaaaatcattatgggaagatggctgggaagagaggaggagtggcagaagaaagataggttggagacaattgattgctcgatgatataaaatgttaagtaccatgaatgatgctgttaggctggaatgcgccaagcataaaggtggggcatggcatcaaaaggtaggtcaacatattaaataattccatgtattgaaatatccagaaaatatatagacagatctatagagatagaaactggtctgcccaggactaggggttgtctaaggataaggagcttcttttttggatggtgaaataacctaaaatatattgtgccattgtttgcacaactttgtgaatatattaaaaacctgttaattgtactcactaaatgtcctccttctaaattaagctgttcttgacaagaaaaggaaagaaacaaagaaaagaagagaaaaaaggtcaaggtttggtcctgggtgctcaaatggcaggccacagacaggaaacacagttgtgaggaattacaacagcctcccggccagagctggagaggtggagcccaggtcccctctaacaccccttctcctggccaggttggagtcccgccacaggccaccagagcggagcagcgcagcgccctgtctcccagcctgaggtgcagtgctgcatctctggtcagttgggagtctgagatgaagcactgtagctcaggaagagagaagttgttctgcagccatcagcctggaagtggtaagtgctggggggttgtggggggccataacaggaaggacagagtgtttccagactccatactatcagccacttgtgatgctggggaagttcctctacacaagttcccctggtgccacgatctgcttcacgagtctgggcatgtcctgactcctctgtgtaccccagtgtgtccatcttagcatgaggcgttagcatttccccagcaccctgcctctgctttctctttctgagcccatggcagacacagctaatcagtaaaggcatatattctttttttttttgagacaca

SEQ ID NO: 2412 - DNA, 9575 bp, Homo sapiens
ctgtgatctgacacctatctttaaagactatgagaaatatttagcaaacattgaacagcaacacgggaacagtggcaggaattctgaaagtgaatctaacaaagtggcagctgaaacacagtctccttccctttttggctcaacaaaattacagcaagagtcaacgtttttgtttcatggcaacaaaactgaagatacacctgacaagaagatggaggtggcatctgaaaagaaaacggacccatcatcactaggagcgacaagtgcctcatttaatttcggcaagaaagttgatagctctgttttgggctcattaagctctgtccccctgactggattttctttctcccctggaaactccagtttatttggcaaagatactacccagagtaaaccagtctcttcaccatttcccactaaaccattggagggccaagcagaaggtgacagtggtgaatgcaaaggtaagtaccagctttgtcgttgagtcgaggtttgcataagattcttgtttcttgggaaacccagagactttgattccaaatatgagtctggattcacattgagacgttgttctctccatgtgtgatctcagacagagctaatcagcttctctgagtttcagattcctgctttataaaagagtaagacttttgtagggttgtttataaggattaaaaataaaatgaatttgaaaacacctgactttgaaaagtctcaaacacacatggtttagcatataaaaaacaagtgaattaaagacgttttttgaaaattgtgtttttggaaaagttcatcaagttcatcatgaatgtcccctgaattgatttgtacttaggagatctcactgtaaataaagtcatgtggcaaaacagtacttgactatacattacaaatgtagacttttcatagccatagagaagaaatcaacattgttttcctcctgtgggtttggaggcgcctcctttccagagcgtggcagtggtgtctaagtgatgtttcctgtgtgtatcgtcagtgccccagacaaggcacaaggtctgggccctccagacctctgttgttagcttaaaaagtggggtgatgtcatgatgctgcttcctcacatggtggttgtgaacaggtgatgtctgtgaagacacctacttctaagcagttgaaagtgaggccaggtgaggtggcccacacctgtaatcccagcacttcgggaggccaaagtggaaggctcacctgaggccaggagtttgagaccagcctgggcaacatagcaagaccccatctctacaaaaatttttaaaaattagccaggccaggtggtgggcgcctgtagtcacagctactctagaggctgaggtgggagtatctcgagctcagaagttcaaggttgccatgagccgtggttgcatcactgcactccagcctgggcagcacagaccttgcctcaacaaaagaaaaagtgtacttctcagacatatggacatactgatccttgaggaagaaaactgcatttgccaatttgcctctgaaatattacggttttctatcaggagtctagacttccattactgttttgccttgccctgctttcaagtatatcctcaggcacgggccctctgggcacagggtgaaataagggtctccccttttctttcttctctgcctcccataaataaaacaaatggggagtctttcctgaggcaggcactggggatttgaatcgagtcccagtggaggcaggatgcccctcagtgagcgcctgttccttgtcccttggttatcacagtttaagcatcagaagactcgggagattggagggataagacggacagtcgtgtgacctaatcatctgagcatcacagttgtttttcttagaattgctttttggtgagtttttatgcaactgccgttctctttaagaggatccttttatatatgtggggttttttatttttttgagacagggtctcgttctgtcacccaggctagtagtgcagtgacgcaatcatagctcactacagcctctacctcctggggtgaagcaatcctcccacttcagtctgccaagtagctgggtccacaggcacgtaccgccacacctggttaacttttttattttttgtagagatggggggcgtctcaccatgttgaccagactggtgttgaactcctgggctcaagcgatcttcctgccttggccctgcagcgtgctgggattacaggcgtgagccactgtacacagcctaatacatgtgtttaaatgatggcctaggtctcccgtgtttgggagaccccgttagtggggatacctttggtaccagagcagtgacccatgtggcaattcagacaaagcttaaattacttacactggggctttggaatgatttttctgacaacttgtcccctgttaaaaaaaaaaaaagtatttttctatctttggctattactgatacttgtagatgtagtcacaggaatattcaggggtgaaggtgttaaaaactcatccgagatggaattttccagtgggtaatttgcatatagagtgttgattttttttttctgtcataagcatggagatttttccattttaaggttttctatatattggaagttattttagaattaagaggtatgttcccattaaaagggattcttatttttcacaaaatagttaaaatcctgcaggtactcccttctggcatccccccccccccccattaagtgtgcattttagtctgtcagtttacatggagtgctccggtggaggtttagggtgttacgtaacaaaacttcagtcacttctttaagctctggattggaatcttactgaattattgtcatttttataaaaggtggagatgaagaagagaatgatgagccacccaaagtagtagttaccgaagtaaaagaagaagatgctttttactccaaaaagtaagaatccccacaacctgctggcgcatgtgttttgcaggcatggtggcatgcttcaggctggagaatgtcctcacggcacttgactgagcttccagtctcggggtcaagctttgcctgctctcaagtggaacaggaaagaattcttggccagtttatttaaaaatccagttctagaaatgtcctggtgggcaggtctcactcttttctgtcactttagctcttttaaagtgctttagagacaggatcttccatgatcttcccaaccccatcccatcccatcccattccatcccgtcttctctccctgtgtctttctccctccccttcctcctccccaacaaagaaatcgcagagtcagtcagtgatttcaggtttggcctcagaaggcatctctcatcccttcctggagacttggttggcctttctggattttctcatagtcaaaaagttaagcacagtaaccgtcccttcctgttgaggacttataaaaactttcatcttcctttcaattaaatgagattagtttttacaaagatatttgctgaaaaaacatctgtgccatttcagaagctttcaaagatgtgtttttgtaatgcaaaaatttccgaataatgagccagcagttttccatgaacaggtcaccacatcctgtgggattcccaggtgttagtttcaagaacttttaaaagaggccaacaatttcttctgtgtttaaatttcattactcacatgacataaaggagtgacccaactttaagattttttttttttttaattagaatcaaatgaggccaggcatggtggctcatgcctgtaatcccagcactttgggaggctgagacaggcagatcacctgaggtcaggagttccagacaaacctggccaacatggtgaaatcccgtctctactaaaaatatgaaaattagcctaatgtggtggcgcacgcctgtaatcccagctgtttgggaggctgaggcatgagaattgcttgaaccctgagaagcagaggttgcagtgagccaagatcatgccactgcactccagcctgggccacagagtaagactgtctcaaaagaaatacataaatcaatacatgagccatggttttgtattaataacctcaggagatgcatagcacaggaggctgggaagatatttgattactttgttattagttagaccctacccaagaatgttttccaaatttatttaaaaatgttgtgcaatcaaaaactgaaagagccttgaggtttgtttttttttttttttttttgagacggagtctctttctgtcacccaggctggagtgcagtggcacaatctcggctcactgcaagctccgcctcccaggttcatgccattctcctgcctcagcctcccgagtagctgggactacaggtgcccgccaccacgctcagctaattttttgtatttttagtagagacggggtttcaccgtgttagccaggatggtctcaatctcctgacctcatgatctgcctgcctcggcctcccaaagtgctgggatacaggcgtgagccaccgcacctggtcgaggagaatttttaaaataagaaataggccacaaaaaaaaaaggagggagaggtgggcgagataggacagggtctttgtcctttatttgttcctgtctttagaggaccagatcggcgatcttgagctcagggccaaaggagcagaatggcaggggttgggggcgggggggggggggggttggtgttgagccctgattttgactgacttgagaacacagtttcagaaagtgttataaaaagtttcatggggcccactgtttaatttgaaaaaatggggaggagttttaaaatctctaagcagattttcttattctggtttttgctcaggctctgtttggatcaattaaagatttatcctgaagcttcctgtactcatttaatagagattttccacacaagtgtgaagagtggttgttagaaaactgtgtgacttgattcgtccttgaatgcttgatggtccctattatttttctccataggtgtaaactgttttacaagaaagacaatgagtttaaagagaaaggcataggtactctgcatttaaaacctacagcaaatcagaagacacagcttttggtgcgggcagacaccaatttaggtgggtaccttttttcagttagcacaaaatcatcatcacatagtatataaaagcgtttaccctgctgactcaaggttattaatatgtttttaaacagagcgcattcaggccaaattcatcctgtatttacttatttatagttttgagtcccaggataatagtgtgtaaggaaacataaatgtgttagaagctgtaaacaaaatgatttttcattttcctttgtgttagaaatgtgactaagaagctagagattagaccatttaatgaacacccaagggaaattaaccttttaaaggaatcctttttatatagcaagtaatgactaactgcttgctgtccatcctcagttttaacctgaaaagagtccactgcaaggatcctagtgcccggaggaggaggaagacggggcaggcctgcggtggagcgggcagtagtggtagagaacagggggctgtgttgcagaaactccagggaggcatttttctttcccgtgggcttgactagggagtaataacatggtcgtgtcacttttgcccagggagctgtgccggcctgtgacagaggtgtcctttgtccgtgtggcgcagtgaagacactgggttgtgccaccgtgttcttccttcagtgcaaagacggacagtgttgagagggctgacggttctgagcgaggctgctggctctgagagaaacgctgtgtgggtgcagagacccgggctggagggaggacggaaggccactcctcacagtgagggcaagtgctccccgaggcctcccagttctcagggaaccagtcctgattttgtgctgtcctgttggctccctgtcttagatgtattaagttatttcagcatttaatgtttagcatattacagactcctttggtggagctatagcttctataattttgatgggttttgtttgtttgaatgcaggcaacatattgctgaacgttctgattccacccaatatgccatgtacgcgaacagggaagaataacgttcttatcgtctgtgttccaaatccaccaattgacgagaagaatgccaccatgccagtcaccatgttgattcgggtaaaaaccagcgaggatgcagacgagttgcacaaaattttactggagaaaaaggatgcctgaacacgcaaagtcggctgcagaattattgccaagttgctgctgcttccaccgccccttaaagttagtcagtttttcttctcttctttgacattctaagaacttatagataacttaaaacttttgtgaggaagattaatgtggccaataaaacctttaaatgttaagtgtcaagaaactgcactctcccttcttaagaactgcctaaagtgtaaaatacatttgaatgcaatttttggaagattttttaatgttcgtttattaaactaaccctaagtgatttcttcaaggactgcaatcagggtatcaatttgctttcccaaaggctcttccaacccgtgggttttggggtccaccgccaccacgagagaggcttttgaacaggtgcctggctgtgttcagaaggaagctggcctgtgtgcttctctccggtgggctcagccgacgtgtgagacttgttctgttaccaaatgaaccgggctgccacgctgtgacaggcgtttgtcctctgctttatttttactttgaagctcaaatgcgagtactaagtgttcacctcagcgttcgaatcattggcctgtaaccctgtgggctgcttcacgagaattcaggacctgcattttcattctaaaaagaaatgaacagcttgtgaaggagttttttggcttcatagtttctattcatgaggtagtgttacttctttatccccctaaagacaaaatgaagataaagggggattgccaggaatgggtttaaaagcacaaatgtggtagcttatcatctacaccatggagagtgaacccttacgaaatgaaagtcaaatgagaccatccgagaaaaagatgcgcataggcatttgtaccatgatcaaccccacgcacatgaaaactgtgaccaagtgacgtgcctgggagctttgacacacgagccgtgtgaattcactaggaaacatgtaataaagtcatggaagagaaaatcgtgtgtaaactttgcctttaactttagaccgcagtatattataatacatttgatatctgaaatatctttacttttttaagagtaagattccatatgtctgtctggaagggagccatggttattcacacgaatatccctgtcacttctccagaggtgtcaggtaactaacacgagcattctttgaagactctgggcacatgaatgatacacagaattgaatgtttaaatttccactgagtcctcatgaatcatttgagactagtaccagctgatcttgtgtacaggctcagggtcagtgcccaagggctcccgcgtgtgtgttctgatcttcagtgcgtagcacattctccatttagaaaagagtggtcagaataattgtggacggtacagtggctttttaaaactacagtctttaggtgtaaggtttggcgccgggagcaattttatgatcaaatatgatgaactcctaagtcactgaggtgtgattgggccaatgttggcatgaggttcttgctctacttccagtgttttgattccactgggagaatttggcctagtgtgtggctttggatgaatccgtgtagagagaggtgagcttgtcctgttacagatgctgtcagacatagcgatagtaggcacctagggaggaagtggccgttagttttacactgactttttaagaatggagaatgcacgtgggtttctgttgcggatgattcatagtaagcaagcggttgatgctgttaataccggccccacccgattgacattaagtttattcagcttttaaaaagatgaagaactaaggggaacaaatttaagtttgttgcaacttagccacacatgcttccctggtaccagctggaatcagcagctcacaggcatcttcaggacacttcagtgtatatgacacagtactttgttagcgtctgcgtgtgtatggaaagttgacaaaaaatggcatgaaaagatcatgattggattttcttttaaacctgcccttctgtaaaaaatagtttatatatttttaaattagtaggtatgtgtggcttccttttttcctaacattcccagcaaatttttgctgctaagactatcactgttaaagtgaaaattacagggaaaaatgtgatgaatataccgtaactcaaaatgtgatattttcttaaaatcactcttttatgctttaggaactggttggtctccactttgattattagtgtaaagagcctgagtatacgtggatttcattgtaaaatttaactccttgtcttttacttggggcacggggcccctggagggcttccctactttccccactatgttaacaggtaattctgatttatgcgtttagtttgacttatttttaacaaaatattagaagttatgctttaaaatgtttaatgtggactgaaattttcatcttttgtttgagaatctatgaagtgtatcatatacgtggcctaaagcaaggtgtgtattttgttattctgaaattgttttgcatctggacaaatactaaatatcccagtggcctttttttttttttttttaaaacctgtgtatccatctcatccttttgcgcattcctagtaagcaaaaaaatttgttatgccatcttcattattcgaattacagactgaaaaaatatggccagtttttaaagaagtttagattatgttttccatggaaggacaagtctgactgttcataggctgattttctttaagaggattattctgttttacaatttcaattctagatcacattttatatatgctgcatgccaaaaaaaaaaaaaagagaaaactgccttttctggtgtggaggggaagaaaaactaatattctaccttactagtagagttcaaaacaagttttcactgagagccttttcagtaaaagttaaacaagtttgttttttgagcatttgtcagttattctatttcagaagagtcaaaattcaagcacgatacattttgaaggctttgcaaactcctaaacccctgatgagtcctctcattctggaagtgggaatttgagtagatactgatttgtcccgtagtatggcagatgacagggaggtcttttccaagcaggcactcagaacacaggtcaccgtatgttctcagccagtaacaatcatactgaggacgaaggactctccgtttgatgcagacacaattgtaatggagatgtaaaacttcttagcaatcagatggataaattgtttgctttttactttaaataggaaattgttttctaaaactaaaatacttgaattgtcagacaatataatctcagcttgtattagtttttgaatgctcccatcgaggaagtgtaacaatccatgaaatgtgaataaatgaaaagtaaacaaaa

SEQ ID NO: 2413 - DNA, 2221 bp, Homo sapiens
ctgtactcatttaatagagattttccacacaagtgtgaagagtggttgttagaaaactgtgtgacttgattcgtccttgaatgcttgatggtccctattatttttctccataggtgtaaactgttttacaagaaagacaatgagtttaaagagaaaggcataggtactctgcatttaaaacctacagcaaatcagaagacacagcttttggtgcgggcagacaccaatttaggtgggtaccttttttcagttagcacaaaatcatcatcacatagtatataaaagcgtttaccctgctgactcaaggttattaatatgtttttaaacagagcgcattcaggccaaattcatcctgtatttacttatttatagttttgagtcccaggataatagtgtgtaaggaaacataaatgtgttagaagctgtaaacaaaatgatttttcattttcctttgtgttagaaatgtgactaagaagctagagattagaccatttaatgaacacccaagggaaattaaccttttaaaggaatcctttttatatagcaagtaatgactaactgattgctgtccatcctcagttttaacctgaaaagagtccactgcaaggatcctagtgcccggaggaggaggaagacggggcaggcctgcggtggagcgggcagtagtggtagagaacagggggctgtgttgcagaaactccagggaggcatttttctttcccgtgggcttgactagggagtaataacatggtcgtgtcacttttgcccagggagctgtgccggcctgtgacagaggtgtcctttgtccgtgtggcgcagtgaagacactgggttgtgccaccgtgttcttccttcagtgcaaagacggacagtgttgagagggctgacggttctgagcgaggctgctggctctgagagaaacgctgtgtgggtgcagagacccgggctggagggaggacggaaggccactcctcacagtgagggcaagtcctccccgaggcctcccagttctcagggaaccagtcctgattttgtgctgtcctgttggctccctgtcttagatgtattaagttatttcagcatttaatgtttagcatattacagactcctttggtggagctatagcttctataattttgatgggttttgtttgtttgaatgcaggcaacatattgctgaacgttctgattccacccaatatgccatgtacgcgaacagggaagaataacgttcttatcgtctgtgttccaaatccaccaattgacgagaagaatgccaccatgccagtcaccatgttgattcgggtaaaaaccagcgaggatgcagacgagttgcacaaaattttactggagaaaaaggatgcctgaacacgcaaagtcggctgcagaattattgccaagttgctgctgcttccaccgccccttagtcagtttttcttctcttctttgacattctaagaacttatagataacttaaaacttttgtgaggaagattaatgtggccaataaaacctttaaatgttaagtgtcaagaaactgcactctcccttcttaagaactgcctaaagtgtaaaatacatttgaatgcaatttttggaagattttttaatgttcgtttattaaactaaccctaagtgatttcttcaaggactgcaatcagggtatcaatttgctttcccaaaggctcttccaacccgtgggttttggggtccaccgccaccaccagagaggcttttgaacaggtgcctggctgtgttcagaaggaagctggcctgtgtgcttctctccggtgggctcagccgacgtgtgagacttgttctgttaccaaatgaaccgggctgccacgctgtgacaggcgtttgtcctctgctttatttttactttgaagctcaaatgcgagtactaagtgttcacctcagcgttcgaatcattggcctgtaaccctgtgggctgcttcacgagaattcaggacctgcattttcattctaaaaagaaatgaacagcttgtgaaggagttttttggcttcatagtttctattcatgaggtagtgttacttctttatccccctaaagacaaaatgaagataaagggggattgccaggaatgggtttaaaagcacaaatgtggtagcttatcatctacaccatggagagtgaacccttacgaaatgaaagtcaaatgagaccatccgagaaaaagatgcgcataggcatttgtacc

SEQ ID NO: 2414 - DNA, 440 bp, Homo sapiens
ctccttgttgggggccgagactacttttaaaccattcagaccaagggtttctgttggattaaaatcttaacagattggaatgggaacaattgatccttaatgggctagtgtgcaaagcattggctaggtgctttatatgtattaccttggttagtcctcaaagcaaacctttgagacttattttttaacctttcctatgttactcagcatttatttggtttataaggggtattttctggtttaaaaaaataatattgcaaagatttaagttatccatcaaagtattttcctgaaccgttaacatctaatagaaactaaatgacactaagagaatgtcatctgaagaggaagattgcacctgagccgcagcagccctgtttagatactcagctgcatggctgggctagaacctgggttctcagagtggtcctgggactgac

SEQ ID NO: 2415 - DNA, 4152 bp, Homo sapiens
gggggcatgaacaccaaggagttccgagaccgctggggcggggaagactgggagctgctggacaggtgactgggaagaggagggcatccacgaggcctgggaattccatggcgctccaggcagggagccaggctacagcagcctagctgtccccctcggccgcagagtcccaaagcacagtaaagagcactggactcggaggacgccctcaaatcaccggcctcgctgggactcagtttctctattagaggggtgtgactcgccctctgtctgtgtcacagggttggtgtgaaaattaacatgcctggtacaccgtgtaccaggtacaccaagctgtgtagacataaaccatgatgttctcagcaccaagcagggcaccgtgggagagactgcatcctccccagcccgagggtagtgcgcctcccgtcagctgccgagcggggagcccagagttgtgggaatggataagtagacctggcaaaggtcaggaaagactttggggccagcagaagagacagtgtagaccactgaagggcaagaggacatccaggaggtgccgggtcatgagacaccaagggacctgggggtttggagcaggaggaaagggtcaatgagatgaaaagcctcagagaagaacacagtacaagctgctgccttggcaggtggacaaggagagcaagattgggcagggacaccaggccatgggtggtgaggaggcggaggctgttccgtgtgaggttcctctttcaagaaatgtgctgccaagagaaggggcagagagaggatgttgccttgagatctgagcctatggtgagggagcaaaggagaggggagggtacccttcagaagggcataagcgctgtaacagcgtccacaggaggtggacagggcaaggtcaggagcactgggggcgggacctcgacacgaagacacgctcacttcttcccgagaggcaggacaaaatgcatccaccagtcactgggtccctatacatggccggccatccacatccgttacctcgtttatttctccccagacctcagtgaggtcggcatcatgatctccattttccagatgagaagactgagtcttgaagagaagttaataacttgccccaaatctcactcacttaagcgttagaggcttgaaaactaggtctattggtgttttttcccgttgagggaagaaagaaaaggaaggtgacacactaagagaattcgagtgaaaagggggaaggtaaaggaacgtagataactgggagctcataaaaagggtctgagatcaaaggagcccccagggcagctggaagccttgatttgggaagccgggtccagcagtcacctccaccttgatctctgtgctgggcttttgctgccatgcacggctcctgtacagccctgaacctcctgcctcctcggaggctcaggcatccagttcggccactctcagccctgccagaagtgcagcctccctgtgagagggacaccctgcaggctgcacatgcacaaaaggcctggggagggcctaggcgccaggtgtctcagtgcagcagccctgccttcctccgtctatgacgtgtgccctggaggctgggcgccagttatggggcactcagagtgtgccaggagccgtgctgagccctcagcatccatccttctcgtcttccccacctctgatgtgtatatagtatgtctactctaatattagatagatagaattctatatcacacattatcctctcattacacgtatgtgataatcgtcctcctagagatgagcagacaggctctgaaagaaggcgtgacatacccagtcatgcagctgggatccaaacccaggctgcctggcttcaaagcccacagccgtccactgcacctgccttccctgccccgtggggagcgaacagagggtctgtggtcaatggggaggggccccccagctgccttctgtgcttctgttggctcatctgtgtttctcctcctccaggatactccaagcgggcctggacgtggagcgtctctccctcaggaatttcttccatcatttccattccaagcgaggcatgtggagccgtcgccagatgaagacgctgtagccggagggtgtccgcggggcccagcactccccgctctggactagcagtggctctccagggccctgctactgttcagggatggggagtggggtgacggctggaccccaagaggcctcgaagctgacggcccactccacctggagctgtcccctcacagaggcaggttccggggctcctgtctctgcctcctgggccttcagaagggaggactttgagagagaggccaggagggaccacttgctcagtcgagaacgggaagagctcctgagaaggacgggtcaggaaggagagatctgactgagcgacaccatcctcatccatgaaggtgcacgcccacatcccccaagcgctcctcacgccaagcgctgaccaccagaccctcttctagtggacatattttattggggggcggggattttaaaaacagaaaaccgaaactgctgtccagagcgagggtgaggttgtgcactgagggactgtccccacgtgcaggcctcccgcccactcctatgtcccttgggcgttgtccctggccgcgggactggtcccacgtggggcaggtctctgctccaccccaggctcgtgccttccagagacacacatctcccagtagccaccaaacagctggccactgattagggcattaacttcctccggatggctcacgtcagaccagaagcacagaacgggctgtttctggtgcttgggcattgggaggtggggagctggcgggcaggggcttgccactccctggcactggacattgaggcctgcagaacaggcagggtgatgaaggcaggggagagaagccctttcccttaccggcgtgcctgtgggtaaggcctcccgagaggacatggagaagaggtaaagaggatgtggacatatctgtcaatttccttaggcaagaagcgggtgggggctggacagaaagggacgaaaagggaagtggaagctgtgagcctcacagtccagctccactgcagacctgcccttctgcagggagagccctggccacccggccttgagtggaagaagaggaaagggtgtatgggggcaaaaccctggacagggagcaggataagaagggggcgggatgagaggtttggggaggtgaggacattgccctgagatatcccctggaggcagggagaggagtgggggcaggaggaactgaagaggggggcagtttcagggaaaatagcccttagcctttttagtcgatgccaccctttctgtcacctggagaccttgtacttctcttgcactaataaccccggtgcttttgtggctgggggtttttctgttgctgctgctgcctccaccactgctgtgaattcacccatggtgcattggacactggatcttgaactccagagtctgtttagggaggtgagcacagggctgggggaggtgcggcggggcccagaagaccaggccactgagcccgcgctccaggctgtgacggtccaaaccacggcactggagctgcagggtctgcctagtgggctctgcattccccgagagcacgagtttggcacatgggagaatggagcccgtggagaaccttctggggggtcggggagaatccctgcctccctttaaggaatcatgaaggacagagacttttgagattgtggcttaggaaggccatacctgctccctgggctgtggctttttctggtccctgctgaggccgactggcccctggagaaggatggtggggcataggctagggctgcagttggccagtggggctgccagtttctttctgggaccactctcgtcctcgggcattgcactggaaggctggaaccagcccaaactgcccacctgcttcacttccaatgactaggagccagcccagcctcctgccctgcccacacccctgcgccctgggccagtgccttgcgtttgatgttacctccacaccatctgccttaagaggaagggccgggcaaggcccctactccctagagaaatgtcttgggtaggagagggtgtgggatggtgggaggggaagcattaaatacagcaacttcttagaaaaaaaaaaa

SEQ ID NO: 2416 - DNA, 6698 bp, Homo sapiens
tggcctcagggtttctcctggagtcaccgagccgtggtccacttcgtcgtgcctggtgagcctcaagctgagcctcggcattctcaggggcggggtcctcacactgtcaggagcacccacatctgcttgcactgatttgatcccataagcacttctgagaaagaccaccttatagttgaggaaactgaggctcacaaaaggaaagtcactggtttaaggttatgtggctagtaaatgttgccgctaaaaacaaacactgcctcataggccagtgctctttctttcgtactaggtttcaggattgggtgtgataactggggttgctaacactggggatgatcattggtctggggaagtaagacgggcagcgtacttaatgaagtgatgagcagggttttatatgagaaggaggaacacacaacaggcagaagtgtaacaacagaggtaggatgatggggataggacgacgatactaagagggacagataacagggtttcactagtagagcgtggcagggctactgacaatgagccccagccaaggccttctcgtgggtcccctgcctgggaggagggaacgtggggagcaggatgcagaggcccccttaactggtgagcactccctctgcctcatgtctctgtgctgcactgctaatggttttgcagagttgcactgtcccctcagccgaggtccgatgggcactcctgactcacctgggagctgggggtggaggcgctcatccgctcatctttgccttgtctgtgtttccttctcctgcctgaccccctggggtagtgaagaaccaggcacgctgggtacagcaattcatcaaagacatggaaaacctgttccaggtcaccggtgacccacacttcaacatcgtcatcactgactatagcagtgaggacatggatgttgagatggcactgaagaggtccaagctgcggaggtgagggggaccaccagccagggggtggcatgggccacgtccatcctaaagtcctagggctgctgggtccagggtagagccaggagtcctgcccagccttcctgattcctagtctccaacttttcccagagggctcacctgcccataatcccatcccaggagcacacatcatctctcttctatgcctgccaacttcctccaggggaccaccgcagctgagtcctgatacgcagccctctctccccttcctgcagctaccagtacgtgaagctaagtggaaactttgaacgctcagctggacttcaggctggcatagacctcgtgaaggtaaagggcctggatggggcctgcgagatggaattcaaggctggttaagaggtagagagacatttggggtaaatgaggtggtgagcccctcagggaggacgggaatgaggacacaggaggtcctctctgctgtgctgcaggccagtgctagggtgggaccagcaaatcacagtggagcatttgcccagttgtccagggtccttggagcctataaagagtggggaggagtcagaattcactctgatggttaagacctgtgctccaatgttcagcactgtggaactctgcccagcagctggttttgtgggagtttgtgaatcactccaatagggaagactccgaggcttctcctagacggcgacctgacctcctagctctggtctgcagggtctgctgaccctgcccacatctgtccccaggacccgcacagcatcatcttcctctgtgacctccacatccacttcccagctggagtcatcgatgccattcggaagcactgtgtggagggaaagatggcctttgcccccatggtgatgaggctgcattgtggggccaccccccagtggcctgagggtgagccctgctcagactggggagggaggaaagacttctctgatcttggctcttaactccagagctgggaacagtcatatctatgagcgtcagcatcctcctcccctgccccaccctgccctcctgtggccttcactccccggaaaactcaccagacaaggtccccttgggctgagctgacagccacagcagcaggtgcagcagtgcacacctcctgcgccgtcttctccttgattcattcatcacacacttactaagcactgctgtgtgccagatgctctgccctgtggggattcaaagatgggaaaggtagcctccctgcctgtggaaagggaaacggacatgtaaactgacacacagctgtgtcttctgtggctgccgctgtccgatccatttgtagggttgttatcagcccatgggcacagcctggtagcactgctgagccctgaaccttagttaggggtctttcctccaaaacaggcaaagtacttgttcagctaagacagttttcagcctccctcaaccccagcctctgactttcagaagagcctctaggcacacagcctggaagcctccttccttcctcctcctggcctctggctcatctcacccgaagctcctgtctgtccacaggctactgggaggtgaatgggttcgggctgcttggcatctacaagtctgacctggacaggattgggggcatgaacaccaaggagttccgagaccgctggggcggggaagactgggagctgctggacaggtgactgggaagaggagggcatccacgaggcctgggaattccatggcgctccaggcagggagccaggctacagcagcctagctgtccccctcggccgcagagtcccaaagcacagtaaagagcactggactcggaggacgccctcaaatcaccggcctcgctgggactcagtttctctattagaggggtgtgactcgccctctgtctgtgtcacagggttggtgtgaaaattaacatgcctggtacaccgtgtaccaggtacaccaagctgtgtagacataaaccatgatgttctcagcaccaagcagggcaccgtgggagagactgcatcctccccagcccgagggtagtgcgcctcccgtcagctgccgagcggggagcccagagttgtgggaatggataagtagacctggcaaaggtcaggaaagactttggggccagcagaagagacagtgtagaccactgaagggcaagaggacatccaggaggtgccgggtcatgagacaccaagggacctgggggtttggagcaggaggaaagggtcaatgagatgaaaagcctcagagaagaacacagtacaagctgctgccttggcaggtggacaaggagagcaagattgggcagggacaccaggccatgggtggtgaggaggcggaggctgttccgtgtgaggttcctctttcaagaaatgtgctgccaagagaaggggcagagagaggatggtgccttgagatctgagcctatggtgagggagcaaaggagaggggagggtacccttcagaagggcataagcgctgtaacagcgtccacaggaggtggacagggcaaggtcaggagcactgggggcgggacctcgacacgaagacacgctcacttcttcccgagaggcaggacaaaatgcatccaccagtcactgggtccctatacatggccggccatccacatccgttacctcgtttatttctccccagacctcagtgaggtcggcatcatgatctccattttccagatgagaagactgagtcttgaagagaagttaataacttgccccaaatctcactcacttaagcgttagaggcttgaaaactaggtctattggtgttttttcccgttgagggaagaaagaaaaggaaggtgacacactaagagaattcgagtgaaaagggggaaggtaaaggaacgtagataactgggagctcataaaaagggtctgagatcaaaggagcccccagggcagctggaagccttgatttgggaagccgggtccagcagtcacctccaccttgatctctgtgctgggcttttgctgccatgcacggctcctgtacagccctgaacctcctgcctcctcggaggctcaggcatccagttcggccactctcagccctgccagaagtgcagcctccctgtgagagggacaccctgcaggctgcacatgcacaaaaggcctggggagggcctaggcgccaggtgtctcagtgcagcagccctgccttcctccgtctatgacgtgtgccctggaggctgggcgccagttatggggcactcagagtgtgccaggagccgtgctgagccctcagcatccatccttctcgtcttccccacctctgatgtgtatatagtatgtctactctaatattagatagatagaattctatatcacacattatcctctcattacacgtatgtgataatcgtcctcctagagatgagcagacaggctctgaaagaaggcgtgacatacccagtcatgcagctgggatccaaacccaggctgcctggcttcaaagcccacagccgtccactgcacctgccttccctgccccgtggggagcgaacagagggtctgtggtcgatggggaggggccccccagctgccttctgtgcttctgttggctcatctgtgtttctcctcctccaggatactccaagcgggcctggacgtggagcgtctctccctcaggaatttcttccatcatttccattccaagcgaggcatgtggagccgtcgccagatgaagacgctgtagccggagggtgtccgcggggcccagcactccccgctctggactagcagtggctccccagggccctgctactgttcagggatggggagtggggtgacggctggaccccaagaggcctcgaagctgacggcccactccacctggagctgtcccctcacagaggcaggttccggggctcctgtctctgcctcctgggccttcagaagggaggactttgagagagaggccaggagggaccacttgctcagtcgagaacgggaagagctcctgagaaggacgggtcaggaaggagagatctgactgagcgacaccatcctcatccatgaaggtgcacgcccacatcccccaagcgctcctcacgccaagcgctgaccaccagaccctcttctagtggacatattttattggggggcggggattttaaaaacagaaaaccgaaactgctgtccagagcgggggtgaggttgtgcactgagggactgtccccacgtgcaggcctcccgcccactcctatgtcccttgggcgttgtccctggccgcgggactggtcccacgtggggcaggtctctgctccaccccaggctcgtgccttccagagacacacatctcccagtagccaccaaacagctggccactgattagggcattaacttcctccggatggctcacgtcagaccagaagcacagaacgggctgtttctggtgcttgggcattgggaggtggggagctggcgggcagggggcttgccactccctggcactggacattgaggcctgcagaacaggcagggtgatgaaggcaggggagagaagccctttcccttaccggcgtgcctgtgggtaaggcctcccgagaggacatggagaagaggtaaagaggatgtggacatatctgtcaatttccttaggcaagaagcgggtgggggctggacagaaagggacgaaaagggaagtggaagctgtgagcctcacagtccagctccactgcagacctgcccttctgcagggagagccctggccacccggccttgagtggaagaagaggaaagggtgtacgggggcaaaaccctggacagggagcaggataagaagggggcgggatgagaggtttggggaggtgaggacattgccctgagatatcccctggaggcagggagaggagtgggggcaggaggaactgaagaggggggcagtttcagggaaaatagcccttagcctttttagtcgatgccaccctttctgtcacctggagaccttgtacttctcttgcactaataaccccggtgcttttgtggctgggggtttttctgttgctgctgctgcctccaccactgctgtgaattcacccatggtgcattggacactggatcttgaactccagagtctgtttagggaggtgagcacagggctgggggaggtgcggcggggcccagaagaccaggccactgagcccgcgctccaggctgtgacggtccaaaccacggcactggagctgcagggtctgcctagtgggctctgcattccccgagagcacgagtttggcacatgggagaatggagcccgtggagaaccttctggggggtcggggagaatccctgcctccctttaaggaatcatgaaggacagagacttttgagattgtggcttaggaaggccatacctgctccctgggctgtggctttttctggtccctgctgaggccgactggcccctggagaaggatggtggggcataggctagggctgcagttggccagtggggctgccagtttctttctgggaccactctcgtcctcgggcattgcactggaaggctggaaccagcccaaactgcccacctgcttcacttccaatgactaggagccagcccagcctcctgccctgcccacacccctgcgccctgggccagtgccttgcgtttgatgttacctccacaccatctgccttaagaggaagggccgggcaaggcccctactccctagagaaatgtcttgggtaggagagggtgtgggatggtgggaggggaagcattaaatacagcaacttcttagaaaaaaaaaaa

SEQ ID NO: 2417 - DNA, 1885 bp, Homo sapiens
aagagtggatttgaagaaacctttatagatatagattccattttacaagaagggaaaactgaggcctggagcagaaggaagcagtggggtagagtcagaaccagcatccttaagccgggcagacttggccttagacagacatgccttacttaggtccagcagatgctaccaggaaggtatggctggcagtacctgcgtctgagctcaggacttcagaccaagatggaagtcccttagaccaataacaaaaaaatcactttttaactcaggtgctgtgggtagggagcaagggcagctatactgtcctttcagaagctctcctgggctgtgggaagtgcccacgagcctggcagatcacggaggaaggaggcagaagttccaggcccagaacctgttggggaagcagagaagaggcaatgaggatggcaggccagatcaatgcccctcaaccttcagcatgcccaggatgcacctggccacgttactcatgcacgtgcctgtagcacgtgctcgagcagagcctgagattctgcatttccagcaagttcctgggtggtttgtggatgctgctgacccatggaccacagtcagtagcaagagctgctagacaatggcagggagaaattccccatctccacctttcctcttgccggaggggcagagtcaaccactaatggcatcgcctccaccctgtcccagaccgtgggaaaacctgagcctcagagcagagagccattaacacagcagtggggctttgtgcaagcctcgctgaggccaggctcttgcagatcctctccttgctctcggagctacaggccttccccctttgtttggcaagggatctgtttcttgccccaaagccccagaggagagagaagggccacctggggagtccctggagctggggttcctccatcctccctcacctgggtcccaggctgcattcagagaggattccttgaggccctggcagccaggaaccctgttttatgtgccccgaaggctgtaatgaaaacattgatgaccacagtgaagaagaccaagatggtggctgcgttgttgagctggttgagtcgccactgcttttctacctcattcaggttcagccgtgctgcagggaagtggagtggggggaaagggtcagagacggggccacagcacggagctgcccccacaacacccaccagagtttggagagaggggcccttcagaaacccatgtggcagaaatcaagggaggtggtcgtcatcgggctgagatgcctctgccctcgccaaccagtacaatggggcaccctagtgtgcttcatcccaccaggatttgggaacttaagctgggtcctgtaagcgtggggacgagtgctcatggagaagcggtgagcgagtgagtgagttagcagttagcgaggtgctggcgcagtcattcagcaggtactgcggagggtctgctccatgggataccaggagacaggacagggcgcctgccctcgcggggtggaagttggtctttgggcctctgttagcggagggctcactgcaggtcagcgtgtggttgcaaagctgcctgtgccaatgcagggtggcccaggggacacgtggggcctttctgccagccacgggtgccgaggcagaaggtctgactgcaggctgggctcctcaccaatgaccacgagcaggacaccgatgaccacctgcaggagcagagagaggctgatgagggtgaccagggtggtgtagtagtgagaggatggtccctgctccagcaccgccttcagccgcatggcgttggacatgaacagggccacgtccagcatgctctccgccacgctcttcttggtggcgtaatggttcaggttgatgggctggctcctggggtcggagcttcc

SEQ ID NO: 2418 - DNA, 130 bp, Homo sapiens
accacacctggctaattttttatatttttagtagagacagggtttcaccatattagccaggctggtcttgatctcctgaccttgtgatccacctgccttggcctcccaaaatgctgggattacaggtgtg

SEQ ID NO: 2419 - DNA, 1885 bp, Homo sapiens
aagagtggatttgaagaaacctttatagatatagattccattttacaagaagggaaaattgaggcctggagcagaaggaagcagtggggtagagtcagaaccagcatccttaagccgggcagacttggccttagacagacatgccttacttaggtccagcagatgctaccaggaaggtatggctggcagtacctgcgtctgagctcaggacttcagaccaagatggaagtcccttagaccaataacataaaaatcactttttaactcaggtgctgtgggtagggagcaagggcagctatactgtcctttcagaagctctcctgggctgtggaaagtgcccacgagcctggcagatcacggaggaaggaggcagaagttccaggcccagaacctgttgaggaagcagagaagaggcaatgaggatggcaggccagatcaatgcccctcaaccttcagcatgcccaggatgcacctggccacgttactcatgcacgtgcctgtagcacgtgctcgagcagagcctgagattctgcatttccagcaagttcctgggtggtttgtggatgctgctgacccatggaccacagtcagtagcaagagctgctagacaatggcagggagaaattccccatctccacctttcctcttgccggaggggcagagtcaaccactaatggcatcgcctccaccctgtcccagaccgtgggaaaacctgagcctgagagcagagagccattaacacagcagtggggctttgtgcaagcctcgctgaggccaggctcttgcagatcctctccttgctctcggagctacaggccttccccctttgtttggcaagggatctgtttcttgccccaaagccccagaggagagagaagggccacctggggagtccctggagctggggttcctccatcctccctcacctgggtcccaggctgcattcagagaggattccttgaggccctggcagccaggaaccctgttttatgtgccccgaaggctgtaatgaaaacattgatgaccacagtgaagaagaccaagatggtggctgcgttgttgagctggttgagtcgccactgcttttctacctcattcaggttcagccgtgctgcagggaagtggagtggggggaaagggtcagagacggggccacagcacggagctgcccccacaacacccaccagagtttggagagaggggcccttcagaaacccatgtggcagaaatcaagggaggtggtcgtcatcgggctgagatgcctctgccctcgccaaccagtacaatggggcaccctagtgtgcttcatcccaccaggatttgggaacttaagctgggtcctgtaagcgtggggacgagtgctcatggagaagcggtgagcgagtgagtgagttagcagttagcgaggtgctggcgcagtcattcagcaggtactgcggagggtctgctccatgggataccaggagacaggacagggcgcctgccctcgcggggtggaagttggtctttgggcctctgttagcggagggctcactgcaggtcagcgtgtggttgcaaagctgcctgtgccaatgcagggtggcccaggggacacgtggggcctttctgccagccacgggtgccgaggcagaaggtctgactgcaggctgggctcctcaccaatgaccacgagcaggacaccgatgaccacctgcaggagcagagagaggctgatgagggtgaccagggtggtgtagtagtgagaggatggtccctgctccagcaccgccttcagccgcatggcgttggacatgaacagggccacgtccagcatgctctccgccacgctcttcttggtggcgtaatggttcaggttgatgggctggctcctggggtcggagcttcc

SEQ ID NO: 2420 - DNA, 338 bp, Homo sapiens
gtggctgtgactgcaactcccctgccttaaaaatgtaaatttaatgatcactttcaaactgtccctgtagtacattatttatgaacataggaccttgcctccctgaatagcaccaagcgcccatggctcagacactcatcagtggggccgtgccccacccactgcctggatttcctccctcctcctccttctccatctctccactctctttctgctgccctctctccccaccctaacgtcatttctttacctggttatttttaaaatccaaaaaacaatttgaagtgacatttgttatacttaagaaacaattttatgtcaccaatgtttggtcactt

SEQ ID NO: 2421 - DNA, 154 bp, Homo sapiens
gtgaacaccaaatttccgtatcctcaagatcagaaatagcacgacaataaaaagagggaggaagaaaaaaaacagtctaggatgtcaacaattttttttctgaagatttattttcttctctttgcttgttcatattttctttccttccttcctt

SEQ ID NO: 2422 - DNA, 1125 bp, Homo sapiens
gcaggatgcccgatatggagagatagtgagtaaaatcgagcaagcagaccagagccagatggcagggcaactgtgagacatttcaagcaggaaggtgaaataggatttcctttataagatagtttctctgttgtgagagcaccactgaggtagggtgggaatgaattcaagaatttcacatagggccaggtggggtggctcatgcctgttaatcccaacactttcagaggcagaggcaggaggattacttgagcccagtagtttgagaccaccctgggcaacacagtgagatcccatctctacaagaaaatttaaaaaaaataagggaatttcctgtaggaggacagtacagtaatccaggaagaaaagatgaatggctcagctgagacaggacagtagggctgggggaaaagtgctggcgtggagagattatggagacagaaccaacagttctcagctggcatttgggagtagaagcaggctatggtttaatcaccaggtttctgtcttgggaaaacaagacatggaaaaagtgttttgggggaagaagatagtgaaactggtttgagactttctgagatggagatataggtggaacacttaggtggatatgtggttttaaaaaaaatgtctagaccaatagaaatatattgagcagcaaagagaagccacctatgtaatttttaatgttctatcagccacattttaaaaagtaaaaggaaacagatgacaccaacttttataatatttttaacctagtacagccaaaatatgatttcaacaagtataaaaaatagtaatgatttccttgacattcttttttttcgcatcttgtgtgtattttgcaggataacacatctcagtgcaagcaaggcaggtgcccgggagccacatgtagcccgtggttgccatgtagaccttcagagagaggctgggcaggaggtgtctgctggggatggactaggataaaaaccttctctgaaggtacagatcaaagattgctgaggcagggagggtgcagcagaggtgagcttgtcccagtggcaggagagaggaaggaattgccgaagctgccccgacctctttcttctatttttgagggtgtaggatgtgagattggagtct

SEQ ID NO: 2423 - DNA, 577 bp, Homo sapiens
ctccgaggcgctgcggcggctctcggtctgcgggaggaccctcagtttagacttggccaccagtgcagcctcaggcatgaaagtgcaaggggacccaggtggaaagacggggactgagggcaagagcagaggcagcagcagcagcagcaggtgcctgtgaacatacctcagacgcctctggatccaagaaccaggggcctgaggatctgtggacaagagctggtttctaaaatcttgtaactcactagctagcggcggcctgagaactttagggtgactgatgctacccccacagaggaggcaagagccccaggactaacagctgactgaccaaagcagccccttgtaagcagctctgagtcttttggaggacagggacggtttgtggctgagataagtgtttcctggcaaaacatatgtggagcacaaagggtcagtcctctggcagaacagatgccacggagtatcacaggcaggaaagggtggccttcttgggtagcaggagtcagggggctgtaccctgggggtgccaggaaatgctctctgacctatcaataaaggaaaagcagtgattcat

SEQ ID NO: 2424 - DNA, 13237 bp, Homo sapiens
agcaactgtttggcagtcagagtcccacatcctgctcaactgggtcaggtccctcttagaccagctcttgtccatcatttgctgaagtggaccaactagttccccagtagggggtctcccctggcaattcttgatcggcgtttggacatctcagatcgcttccaatgaagatggccttgccttggggtcctgcttgtttcataatcatctaactatgggacaaggttgtgccggcagctctgggggaaggagcacggggctgatcaagccatccaggaaacactggaggacttgtccagccttgaaagaactctagtggtttctgaatctagcccacttggcggtaagcatgatgcaacttctgcaacttctgctggggcttttggggccaggtggctacttatttcttttaggggattgtcaggaggtgaccactctcacggtgaaataccaagtgtcagaggaagtgccatctggtacagtgatcgggaagctgtcccaggaactgggccgggaggagaggcggaggcaagctggggctgccttccaggtgttgcagctgcctcaggcgctccccattcaggtggactctgaggaaggcttgctcagcacaggcaggcggctggatcgagagcagctgtgccgacagtgggatccctgcctggtttcctttgatgtgcttgccacaggggatttggctctgatccatgtggagatccaagtgctggacatcaatgaccaccagccacggtttcccaaaggcgagcaggagctggaaatctctgagagcgcctctctgcgaacccggatccccctggacagagctcttgacccagacacaggccctaacaccctgcacacctacactctgtctcccagtgagcactttgccttggatgtcattgtgggccctgatgagaccaaacatgcagaactcatagtggtgaaggagctggacagggaaatccattcattttttgatctggtgttaactgcctatgacaatgggaacccccccaagtcaggtaccagcttggtcaaggtcaacgtcttggactccaatgacaatagccctgcgtttgctgagagttcactggcactggaaatccaagaagatgctgcacctggtacgcttctcataaaactgaccgccacagaccctgaccaaggccccaatggggaggtggagttcttcctcagtaagcacatgcctccagaggtgctggacaccttcagtattgatgccaagacaggccaggtcattctgcgtcgacctctagactatgaaaagaaccctgcctacgaggtggatgttcaggcaagggacctgggtcccaatcctatcccagcccattgcaaagttctcatcaaggttctggatgtcaatgacaacatcccaagcatccacgtcacatgggcctcccagccatcactggtgtcagaagctcttcccaaggacagttttattgctcttgtcatggcagatgacttggattcaggacacaatggtttggtccactgctggctgagccaagagctgggccacttcaggctgaaaagaactaatggcaacacatacatgttgctaaccaatgccacactggacagagagcagtggcccaaatataccctcactctgttagcccaagaccaaggactccagcccttatcagccaagaaacagctcagcattcagatcagtgacatcaacgacaatgcacctgtgtttgagaaaagcaggtatgaagtctccacgcgggaaaacaacttaccctctcttcacctcattaccatcaaggctcatgatgcagacttgggcattaatggaaaagtctcataccgcatccaggactccccagttgctcacttagtagctattgactccaacacaggagaggtcactgctcagaggtcactgaactatgaagagatggccggctttgagttccaggtgatcgcagaggacagcgggcaacccatgcttgcatccagtgtctctgtgtgggtcagcctcttggatgccaatgataatgccccagaggtggtccagcctgtgctcagcgatggaaaagccagcctctccgtgcttgtgaatgcctccacaggccacctgctggtgcccatcgagactcccaatggcttgggcccagcgggcactgacacacctccactggccactcacagctcccggccattccttttgacaaccattgtggcaagagatgcagactcgggggcaaatggagagcccctctacagcatccgcagtggaaatgaagcccacctcttcatcctcaaccctcatacggggcagctgttcgtcaatgtcaccaatgccagcagcctcattgggagtgagtgggagctggagatagtagtagaggaccagggaagcccccccttacagacccgagccctgttgagggtcatgtttgtcaccagtgtggaccacctgagggactcagcccgcaagcctggggccttgagcatgtcgatgctgacggtgatctgcctggctgtactgttgggcatcttcgggttgatcctggctttgttcatgtccatctgccggacagaaaagaaggacaacagggcctacaactgtcgggaggccgagtccacctaccgccagcagcccaagaggccccagaaacacattcagaaggcagacatccacctcgtgcctgtgctcaggggtcaggcaggtgagccttgtgaagtcgggcagtcccacaaagatgtggacaaggaggcgatgatggaagcaggctgggacccctgcctgcaggcccccttccacctcaccccgaccctgtacaggacgctgcgtaatcaaggcaaccagggagcaccggcggagagccgagaggtgctgcaagacacggtcaacctccttttcaaccatcccaggcagaggaatgcctcccgggagaacctgaaccttcccgagccccagcctgccacaggccagccacgttccaggcctctgaaggttgcaggcagccccacagggaggctggctggagaccagggcagtgaggaagccccacagaggccaccagcctcctctgcaaccctgagacggcagcgacatctcaatggcaaagtgtcccctgagaaagaatcagggccccgtcagatcctgcggagcctggtccggctgtctgtggctgccttcgccgagcggaaccccgtggaggagctcactgtggattctcctcctgttcaggtacctggggcatgggcagctctttctctggtcactcctggaccaccagaaacagaatcagacacccccataacctgcacagtcctcatgtttcttccttaggctcacctggcactttctgatgctttgggtagcaatggttcagggcacagctttgtgatcggctgaacttagctgtgtgatcctaggcaaattccttactgtctctgggccttagttgtcttatctgtaaattagagatgatagtaagagtatctaccttgtagagttgtccagaggatttgatcaattaattcctataaggcatttatggtgcctcacaagtagacacacagcaaaggtagtgattaagagtataagctttgggcaaggttacctgggttcaaatcctggctccacttcttcctagctctgaaccacagaggaagttaacatctctgttgaagatgtctatgttaacaccacccatcttctaagtttgcttgaaaataaaatgagtgaatgctcttaatgcctgtagaacagtgtccatctgacatgtagtcagtactcagcaaattattactattacttcctcaaagcacttctccatctccactatttgcctgccttcatctcatctgggcaacttccctatgaagaaggccagcataggcatcattgcacccaaacccaggtgttgcaaataatttgtctgagaccccagagctttccggctgggcctgcggatggggcagtggaaattaccttagaacttagcagttaggcagattggagttcagatttcaacacagccacttaggagctgggcaaccttgtacacgtccttcaacatctgagcctcattttcctcatctataaaatggggattatgagaccaaacttaccctgtgtctgcctccttagagtgtgagggctaaatgggatgatgagtgtcaaaatgtctaaggacctgggattttctagacacaagtggggaaacctttccagggatgatgcctgatctcacacccatatctgcttctgtgaacctcagatattttcactgtgccaggctgcccgcccaaggcacacttctgtttggccaggctatcagctcaggtttcctgtgaagcaaaacacagtttccttccctattccctcctcaggaagccacctggagatggcccagctgttctcttaggaatcttgccctgggatcggtgcagacccagaggctgccagagccaaccattcatttatccttccattcatccatccatttatcaggtgctttttggataaactctgtgctgaacactgtgctggctgctggtagacaggacaacagagaataggccctgtgggtgaccccgctgaggtgacagaaagaaaggtgcccatttgggatcaacttgagggtaacaggcaacttgcccaatgctcatatctttccagcagcacatagagtcagatctgagtgtaaattccagccctcccactaatttctgtgtagcccctgtgagcctccaattccacctctgcaaaatggccataatggtatctcttcccttaggctgttgtaagaattaaatgagattatacaccactggacaatcactgtttatcatgggatttattaataagctcatttaaacctcgtaacccaccatatgacctgggtctcattaatatgcactttttttactgttgaggaaactgagtaattttctcagaatgcttaagtaattcctcaaggccacactgatgggaactggggcagggacatatttaggatttgaacctgagtctgactgattcgagtctgggctgtaactgtgaagtgaccctgaatgacagtgctcagcatagggcttggcatgtagggagtcatgtcatgaaaaggcagctgtcacttgagcaaagggtggcaggtatcttaggagggcttctgggcctgggctgggaggtgggatcttccctgaggcaggcaataagaccccgagtctcccaagtcacagtgaaaccccagtcctggccatctcctcttccaactctcctctgaggttgacacttcctacctcaagctgcacagaggggcatggtggacctcctaagggaggaatggggatggacccaggaggaggaagcagtgtttctaggaataacagtgcaaactccttgcttttgcagaggatttttaactttttcaaaccatttaatcgtgacaacactgagaagaaggcgtgtgggtatttctagccccctattagagatgaggaaactgaggtctgaggaggtctaaaaacctgtctaatgctatacaataagctacaaatggccttgaactagaactccgcctcccaggacttgatctgttgcctctcccttccaatggcctatagggtctggccgtgatatctcacccatcccctactccattctccagtctttctgaaactctaccttctcttccagcctttcagtgtgcagtgcttctgcctgaaaacctccccaccccttgcccagaccttcattctctttccacttgccaaactcctatggagcctttgggtctcagcagaggtgcctggcatgtggtatgaactcagtaacatctgttgaaatgaatgaattaacttaatccagtaccacccccctgcttcctccctgctccaagttgggttaggggccctctgctcccacagagcccccattctttccctatgcccagaggcaacccctgtggtaaacactcttcgctgccctgatctccagccagcctccctgtggggctgcctgcaaccttcacatcctgacagatgtgaccacgctgagggcagcagctggggctccttctccttcttactcccatagcaaccaccctgcctggcacttattaagtacttgttgaatgaatgaaaagatgaataaatgaataattcaatgacaccattttgccttctctacaacatagtcttacatctggtcaacaaaaattggccgaatgtccaaatactgctaaaggggaacataactctttaagataatcttcatcaaagtaacaacaaattgatggtcaggaaatgcctttttcaccccatctctcagagtccaccaggtgcaggacactcggaggaatgagtatgaggggacaggcccagagggtcctcttgctctccttcagacactcaggtcctggggtgacatgacagagcaggggacctgcccgcccaggtccctgtctctgtcactgggcaccatcccccatctgatcacacaaacatctgaagccagaggaaagactataaaaagaaagcaccggcattgagggaaacatccggcgaggaagtgtgctgagtcggaattgtgtggagtcaacagatttttcctgtcttgtagcaaatctcccagctgctgtccttgctgcatcagggccaattccagcccaaaccaaaccaccgaggaaataagtacttggccaagccaggaggcagcaggtaagcagcacgtagcccccacaggcatctcaaggcccctactggccgcccctcatcactgcagcctctgtgagtgaggaagggtgagcacaagtcagacaccggtcccctgggagggtgcagcagacagcatccatcctcccaccctgggagttttggtcgtgaggtgactgtattgatagtatttacaggacctagaagtcctgtaggactaactagctgtattgataaataccatcaatacagtagtcaccaaggaaatgacctcatccctgagactgtatttgtcccaattacagaggtgctgtaaattgcctttatatctgtaactgtcacctctctttctcttgacccataaacataatatgaaggctccccactaaagacatggctgtgtgggcgtgtccctttgggcaatcctagaattgaagacaccttaagagaacatcaaatccaacttcttgttacggatggagaaactgaggctctgagtagcttgattcaaaccagctatgtaaacttgagcaagtgagataatctctcaggaccttggtttccccatctgtaaaacagaacccatcccatttcccttgtggtaatggggtgaggatttcataatcaattgtattctaagcccatagcccagcaactgacacatagtaggtgcacacacaatgctaactcctttccccttgaagcaattttgctaaaggtcatgtaacaagtgagtggcaaagctgggaccagctctcagagttcctgactcctgcatcagtgctcttgccctgacaacttacagcttctttttacaaggatggtgagaggtagtgtactgcaggggtgagtccacacactccagggtcacactggcctggatttgaagtcttgctttatctcttaatctatggggaccttgggcaacctgcaaaatcttcacaagtcttggttttctcatttgtacaatgggttgattaaagagaaccccttacaggtgtggaaggtttgaataagacggtgcatggaccttgcatcgcataaggcctgactcagactcactgctcaaaaacattagttgtcattatcacccacacacttgccacctccctgctcatttcttcacagcagcagaaatggctacaggggaacaaaaccaaacaaacagaaggactcctacgccttaaaacccctcaggtagccttcccacctgctgggatgagggtccaggcctgtccccaagtgtctatgggagagagggaccaggatggagacagcaggagactggggtgcaggtagcagattctgagcagctttaggctgcctcactccggctgcaccctccataggtctgctcttctggcctaggatttggcctaaagtagggaggaaggaatgttcagtcactcattcagcacccactgtgtgccacgccctgttctgagcatcagtaagggagcaggcaatgagacaggcaaaaatcccagccttctcctacggacggatggacggctgcactggctccactgaggtttactaaactcctcctgtgtgccaggcaatacctagacatgggaggggcaacgagaatgatatcaatgaactcatcttcacttctgtctgctgagtgcttacaatgtgccaggctctgtggtaggcccctctacctacaacgtctcattttaccctcacaacaccctgtgaggtgggtgttatttattactctcattttacaaatgaggaaacagagtaagaggagggcgggaatcacatgatccaggttggtctgactctagaggccaggctgtgtatccagttccctatatgggtaaatgaatgcaaacatgaatgggcatgaatgaatgaatctatatgggaatgtccctacccatggactggttggtttcttttgcaggagtgcaatcccagacacagatggcccaagtgcaagggctggaggccagacagacccagaacaggaggaagggcctttggatcctgaagaggacctctctgtgaagcaactgctagaagaagagctgtcaagtctgctggaccccagcacaggtagggaccccctggagttaccttgaccctgcttctgccccatggtgtccaagcttcagagttctgctccaatccactgcagggaaaagccattctgtttctgtggaggaacatcagcaacatttaacttcccttgcacccttgcagcctcagaaagtattttaaagaccaggttctactttgattttttttttttttagacagggtcttgctctgtcacccaggctggagtacagtggcatgatcacagcatgatcacagctcactgcagcattgacctcctgggctcaggtgatcctcccaccttagcctcccaagtagctgggactacaggtgagcaccaccaccacatcccgctaatttttgatttttttttttttttgtagggacagggattcacctgttgcccaggctggtctccaactcctgggctcaagcaatccacccacctcagcctcccaaagtgctggcattagaggcatgagccacctgtaatcaaagccaaagtaggcacctggcctacgttgattattcattttaaaaatcattgtaaaaatagtgaacatgccaggcactggggaagcatcttatgtacatgatctcatttaagcctccaaccaatcccctcaagtagataattattacctcgaatttacagatgagcaaaccgaggctcaaaaaaatcaagtagccttcccagagtcacccagctcaccagtgattgaaggggagccaaaccctgagccagcctgtcctctatggacttcttaccactcattggcgtttggtgtgtttcaataccctttcaccctgggaaccaggtcaactctttaatatgctaacaattgcaatgaaaacaaaaagatttttttgcagagaaataattagctttgacaataaatacataatgtgaacttgaattcaagaatctgctagcgccccccgcccctgctgtggacattggtcagcctcctttggtaacacaccccacggcagaccatccctgtgctgtggttttctatctatgtagttaacactgtttctcatgtgctccatctggctgcagacacactgaaggtatggcagggacttctctttccttggttaaaaaatattgctaatgtttattgggcactttctatgtgctaggccctgttctaagtacctcatgagaaaatcttatgagataggggctattcattatccccatttcataaaggaaaaatgtgagggtcaggggtgtttcataatttgcccaaggttgtgcagctcgtggatggttattaacacaggcagtgtggctgtaaattttagagctgtgttgttcaatgaggtagtcactagcgacaagtggctatttaaatttaagtgaattaaaattaaataaaataaaatattcagttctgccataccagccacatttcaagtgctcactggctatgtatggctgggggatatagctttggattctatctctattggtcagctctggctggaacctgtggggtcagttcccacacggtcctgcttgcccacagcacaaagggtactgaacacaggggcactgtaaggagttgggggtaaggaaagaggaggggcagaaaagcctttgctgctcacaggctggactgccatggggagactgggatcttgctgcttcagatctgcttcagattgcttcagatttgctgcttcggattcagattgccccacttgagaatgcgaccatgataatgttttcctggttgcatgaactcactgaacctcacaacaactccacaagatacgtactactgtctcaccacttcctaagaggaaacgggagcttagagaggttaagccattttcccaaggtcacacacactgcccctaagctgcaaagctgggaaatcaaacccaggttggcccagtgcccacctgcagctagaactggtgggtgatgctgggtgaattcagcatcacttttcagctgttctcatacgccccagtgattttctcattccaagcttcactccttctgaagctctctgacccatgtaaaaggaaaggcctgattctataacaccaagagttccatccaaccttatagcctcagagtctcaaggaactaaggtttgcatttcccaaatgttgaaggttaatatttatgttcattcaatcattcaacaaacattcactaagtcccaggcatggggctaaacccaaggatccagtagggcaggagcccaacagtgtctcacaagctgcacagtccagaatgcagggcagagattcatttatcagtacaataaatgactacacatacttcggaataacttgttcaaattacataagtaatatttggttaatatagaaaaacatagataaacaaaaagagaatggattgcttctgcccagaggtaatttcagttaacattttgacatatctccttccagtctttcattctgtgcgcagattttaaagtaactcaccttaggcaaacattagataaatgttaagtagatgttgtgcttttttttttttttttaatttttttaagacactgtttcttaactccaagacttataatttctttcctctggcttggtctctaccatcaggcctgggactggtttcttgaaacaggattttctgttaaagggatgggaaaagaagggtgactgtggcattgcaaatgtaggggccagttttttgaattcccagccaccaggctgacttgccaccgccactaccccagtccctctcctgggacagcccttggacaggcagcccctccccagcctgactctaggccagggttccagcagcttgagagatgatgttgaggaggatttgaggatctggggccaggtggtaacagtgcagaccttaggtagcctgggaattccagaggccccagctgggcacctggagtatccagggggaggaagggccagctcttcagagagagggtagggtggtgccatcataggcttcaaagtcatcagacctggcatcaaattgaggtttggttgcctagcagatgtgtgacttaacttctttcagcttcagtttcctcatccatcaaatgggaataatactcttgacctcaaaggtttgtgaagttaaatgaaataattatgtaaattgctcatcacgtaagtacctaatatgtggtccctattattatggatgggaaccaaaaaaggcagcgctaagtcaggaactccagccttggcaaagaaaagggattttccctccatcctcagctagtggagccctgaggggagaaggcgccctgaggggtaaaaatcctggatgaaatatagaagacactgagactggaaacacacgcccagattgggaaattcttcagaaatcggcaaatttctacttctaggccttctcctcctcctgctgcttccccacttggttcgcccgggtgtgtcagtcgactgctttcctacccagggagcttccctgtcagggcctcttccttcctgtccccgtctggccactctgtctgtcccctgccatttcccttccctcctttgtccactgcccttgccctgctcattgccccaccctcacccgcctggcccttcccggagcctggccctcactgtgtcccctccttcccccacaggtctggccctggaccggctgagcgcccctgacccggcctggatggcgagactctctttgcccctcaccaccaactaccgtgacaatgtgatctccccggatgctgcagccacggaggagccaaggaccttccagacgttcggcaaggcagaggcaccagagctgagcccaacaggcacgaggctggccagcacctttgtctcggagatgagctcactgctggagatgctgctggaacagcgctccagcatgcccgtggaggccgcctccgaggcgctgcggcggctctcggtctgcgggaggaccctcagtttagacttggccaccagtgcagcctcaggcatgaaagtgcaaggggacccaggtggaaagacggggactgagggcaagagcagaggcagcagcagcagcagcaggtgcctgtgaacatacctcagacgcctctggatccaagaaccaggggcctgaggatctgtggacaagagctggtttctaaaatcttgtaactcactagctagcggcggcctgagaactttagggtgactgatgctacccccacagaggaggcaagagccccaggactaacagctgactgaccaaagcagccccttgtaagcagctctgagtcttttggaggacagggacggtttgtggctgagataagtgtttcctggcaaaacatatgtggagcacaaagggtcagtcctctggcagaacagatgccacggagtatcacaggcaggaaagggtggccttcttgggtagcaggagtcagggggctgtaccctgggggtgccaggaaatgctctctgacctatcaataaaggaaaagcagtgattcat

SEQ ID NO: 2425 - DNA, 6735 bp, Homo sapiens
ccaggctttacaataggatttaatttgattttccaacaatcctgggagggaggtattattaaccccatttcacagacacggatatggggcttggagaggtcaagtggctttcccaagatcaagcagggagtagagccagagccaggatttggacccaggctgggccaacaccaaaacccatgccttcaaccttgacaccagcctgccaaccaaagacaggagaagggaaggccctggaggtgagctgttggcagcagtgaacttgctcgagctccctcgggaaacactgttgaaaggaacatttccaaagccatccaggcccgcacctctctacattcccaagcacaaggcaaaaggaacttggatctgaactgatgcagacccgttctttcccaacaagtagctcttcaagtgcggatgtcatctttcccaaccccatttgcgggtaaaccttcctctgtcattgcaggttcaggcttgtgaatcccagaggacgctgtgtgaactgggtctatgaaatcggcactgacagcagccagccttccaggggatgggggagggaagaaacagcagatattttcccaaggttcagctttataattttcttggaaatttccgagcagccaatcagctagcttctaaatagtgtgggtctctcctggacactgcaggcaaaagttcctctatctgctcctctttttgtcctttcttggagctcagtgctcatgttcactgttcaagaaatgggccaatcatactcccaactagggataatgtgcatcatacatacttggaatacagtgtggtatcattattccattttacagatgaagaaaatgaggctccccaaagttatgagtttcaggggcagagtttctcctcacctcactctaggccagagtgatctccttacagaatctgtgattttcaggctggatcacagaactgttgggttctgtgggccagtgagagaaactgggggatatcaagcaggcaggcagggtctccagcctgaccagccaggtgcctgctacaaagcaacacttgatgaatagctgttgaatggatgtatgaatgaataaatgtgtcaataaatgcttcagaggccccttttatccatattggagctccaggtaggacttcattagaaaaaaagactctgtgatgtaaaagcaaagtctgagaaccacagtactggagtagaccatggtgacctcccagttaccagcagattttcagtgcagagcagatgttgggagggtggagagaagagagtgggcagggggagatgacctgaggaagctggagctatagctggcaactggatcactagacacatgggaccattgcatcattctagttcaaaagccctaaatctgtactccttgggcaccctgaatactaggtaaaactttgtgtctagacacttttttaggcagaagatacaaaattctcatcagattctcaaaggaaaccttgacctttaaaaggttacacagcattgctttaagatactatctaaacatccacagacatgggcagttgtcataaagagtctgaactttatctatttcaactcttcattttatagccaagaatatagaaagaaacggcagatgacttgcccaaggccacctggcaggtttgtgggggagagctttccaaattaagacatttaactgagtgcttgctcaaatcaggatttggatctgggatttagtatggtggtctttttaatacatcaaggattcttaatctgacgtctttggttagacttcaggatctatgaacctactgaactacatgcaaaattgggaggatatgcattttttctatggaaagaagtaggtgcttagatcagattctcaaagagatttcgggcccaattaagattagaaagcactacaatcctctaggtcagccctcagccctgccttccctgcagaacctggagaactcctgcgtagagctgctcctgttctgaactttgatcagaatgggggtgtatgtacgtgagggacagtgttctctcctgcaccatgtgtcccctcctgatgagctgataccagcacctttcccaataacagctcagagtgagaccgtgtctatggtaacagaactgggtgtgttgaacaggaaggttacagaaatttcttgacatcagccaagatgtcaaagctgagactttggacacgctcaaaacagtttccaccaagatgggctctgtcccctgggagactgagggagcaggcgagccagcaagcactgttacatgtcgtcctaatttggaaagcatagagggacattttttaaatcaatagtcagccgttctccagcaccaggagtgcaatgcagtgctcactcagagcctggaggcagctcagagattgacaggcagctgccttgtctgtcacccaacttcagtttggcagctcactgacgctgcctcttctctggctgaaataagagtgatgtggcaaccactacctttgaaactctggagagaaccaaatcccaaaaaagagaggacaggaggaaggagaggcttggcctggcacatagtgtgtacctagaaaatagataagcattttctagctcctactaaattttgggtacaacgtgggaggagtaggacatgatcagaaacactcatgcaacaaacattttgtgtttattgaataattactaagtgccagaagtagcacaggaaaccgtgtgtgtgtgtgtgcgtgtgtgcgtgtgtataggcggcgagtggggggcaatacagaattattcattcaagttatttaaaattattcattcaaattacttaaagtacctactatgtgctgggtaggcttggtgctgggcattgggtggggggagttgagtataatcactcacttatttgttgaatgtatatttactgaacatctgagtgccccacactatattagcactaatgatatagtaaaccaaatagccttgttcccatcatagtgtcaggactccctgaaaacagcatctccggatagggaaactgaggcagtagagcttcccacaaaggtctcattggtgagggcgccgggctttaacccagcatcctgacccaggctggccctgctgatgggagccacctccctctcgtcctctcacacttcctctggggcactgatgatgagtcattaataacagaattttaatggcaaaagcacagcagtacccagctctgccagtgaagcccatccccctggggctggatcaagaccgcagtgactgaacagccaaggatttttggtcccttgacaacacctttctcacgactctgccatccttccctttccacaggagaggcccttcctttttaaattggagagcttaaaaatatcctacccccaacctttggcaccccaaattgaatcagtacttagctcagtagtgactgagtgggagggagagccactcagggagggctgcatctggccttcaccacaggacgcccagtggccagactgtgaaccagccctcggccccagctatggctagaaggaagtagtcagaaaatccaaaatgaccacagaggggaggaggctggggagtggggctccacagggagggcacacggtgacatttcacgcagagggtgccccaggaaggctcaaaagcaatctgtagggaaacgggctctgggctcaattcagtgagagaaaacattgggttaaccaagttctttactggaggacttcttggaacctcaaatatgctgatgtgtattgtgaatctataaaaaggggacgtctggtgcagcatttcccaaacttatttaaccacagaaacctttttttgtttgttttttggcagagagcttagtgcactgcacagcttaaaaccctgagcttgaaacctcaggtttcctaccctgcatggggccttgcactcagtgctggggacactggaatacaaagacaaggaccctgctcccaaggagtgccatctgtggaaggtggccatgtgcagggtccaacagtggtgagccagtgtgcagggcagccctgaaaaggaggcagggagcaggcgaggagatggagctagaggacgcttgggctccccgggtgaaagagaggtgctaggaaagtatggcaggaccactaagaagttgagagagatggggtgggaagcagagagggaaacgtggacaactttcccccctcaaatcttcttgcctttgaattggccaggctggttggtctccactcagtcatgggattgtggggggtgggcggtgggctctctatccctcccagaccccactctcaaccacatctatgctattcaacttgggctaacatccagaagccagggaatagctattcacaaattcagtaactggactcattagcactgactcagaaatctttttttttcctaagtctctctcctggagaagcttttaagatcctttaaattggttagtggagagtttagagatgaggacggagcctcagctttcagctccccctgcccgtctccctggctcttcccataatactcaagggcaagagtgatgagataatccaatatctgttttattaaacacctagacatttctggcacatgtttcccaaatggggacctcaaaatctatactctccagctttaagactcctagcattcaatctacatttactctcccatgggtaggacagtcataatgctttcacataaaattgcagtatgaactgatggacaagaactctgggccaggagtcaggaggcccaggtcctcaccctggcccagcgactcataaagtcatgcaaccatgagcatcactgcctcctgggccaaagtgagcacaaaggtcctctctgtggtgaaatgcccttgcatttgtcttctaaggtaggagggcagacaccattgcctttggtctacaactgaggaaacaatatagggagtcaggtcacagcttcaaggtgacatggccaggcaagtggcagagccagacctgggtcttcacacactttcctcttcttgactgtactggcgcaggtgcttaagatttgggggaaggtgggtgggtatctggcctcttctttgggactcaaattgtgatatctctctgagaacccacaggctccctctttagggctgaggtgagaagttctgaaagtcaagcagacacatccaggcatttgggcaagaaacttcttccttccaaatcacaggtgaaatgaaaacgattatgagcccacgggggatgaacagaggtgaatggtgggctagtctcgaggatggcctaattcagagtttcctaagtgtcagccattcatggaaccacccctgtgatttttgctacctctctggatctgtgcccacttttacgttatgtttttctttaaactgattcactatttttttttacagttagctttatcctagacagaacatctatcaaactacaggtcaatatgctaatcatatttttatattatacattaaatatataactaaatagaaaatattaatttgaataccatctaaaatcttcttgtgaaccagggatacacacatcagacattggcaaacagtagtacagatttaagtgtgagaaaacccaggcataagaaggaagaaggtaagttatttgctcaaagacaaaggctaaggtgagcaccagggtctctggacccttcagtagggtttttcataggtcactgaatgcatcctttggtgcacagaccagaaatgactgtgaatgcatccaagactcatctgtgaggctaccaagcggggggaaagatcagtcacttaccagccatgtacgtgaaattgcttgggaacctgaactcccgctggaatttctacctggaaagggttgctgatgctctatttttgttatccaacctcctgcccgctctggcccctaagaggcaccagggactatgttttatctcaccttagccaaaacctagtcttacaacactcctttccagtgggtaggggtgtgggggaatagccctgctggaggcttccaggctggctccgagatgcccacttctgcagaggaggccaaggttgcctgtgctcgaggcatgtggtaggcgtgaggttcctgctagcagggtgttcaagctgcagagggaggggctggagaaagacttcagtcctgtaactgtcaggtcgctgggccccggggctacaagaagaggtgagagcaactcttactcttgctgtatattcttggactcctactttggagccagcacttcttcaagggcttggttccccaggcattgttaactcccaaccccagtgactcatgagtgagcagggctcttagagccctagaagggtaattcaggcaaccttgggatattgtctctcctacaaaatcatcagagcagctaccatttgttcaatacctactgtgctgtcaggctgtgctaagtcccttagtgtcatctcatttcatccttatgacaacttaatgagttaggtgctaccattaccttcattttcagaggtgaagaaactgaggcactaagccatggagtccaagttcagtgatagtgggggttaaaactcaggtttgactgggcgcggtggctcacacttgtaatcccagcactttgggaggccgaggcgggtggatcgcctgaggtcaggagttcaaaaccagcctggccaacatggtgaaacccagactctactaaaaatacaaaaaattagccagggatcgtggtgggtgcctg

SEQ ID NO: 2426 - DNA, 257 bp, Homo sapiens
acaggtctggccctggaccggctgagcgcccctgacccggcctggatggcgagactctctttgcccctcaccaccaactaccgtgacaatgtgatctccccggatgctgcagccacggaggagccgaggaccttccagacgttcggcaaggcagaggcaccagagctgagcccaacaggcacgaggctggccagcacctttgtctcggagatgagctcactgctggagatgctgctggaacagcgctccagcatgcc

SEQ ID NO: 2427 - DNA, 20869 bp, Homo sapiens
ccaggctttacaataggatttaatttgattttccaacaatcctgggagggaggtattattaaccccatttcacagacacggatatggggcttggagaggtcaagtggctttcccaagatcaagcagggagtagagccagagccaggatttggacccaggctgggccaacaccaaaacccatgccttcaaccttgacaccagcctgccaaccaaagacaggagaagggaaggccctggaggtgagctgttggcagcagtgaacttgctcgagctccctcgggaaacactgttgaaaggaacatttccaaagccatccaggcccgcacctctctacattcccaagcacaaggcaaaaggaacttggatctgaactgatgcagacccgttctttcccaacaagtagctcttcaagtgcggatgtcatctttcccaaccccatttgcgggtaaaccttcctctgtcattgcaggttcaggcttgtgaatcccagaggacgctgtgtgaactgggtctatgaaatcggcactgacagcagccagccttccaggggatgggggagggaagaaacagcagatattttcccaaggttcagctttataattttcttggaaatttccgagcagccaatcagctagcttctaaatagtgtgggtctctcctggacactgcaggcaaaagttcctctatctgctcctctttttgtcctttcttggagctcagtgctcatgttcactgttcaagaaatgggccaatcatactcccaactagggataatgtgcatcatacatacttggaatacagtgtggtatcattattccattttacagatgaagaaaatgaggctccccaaagttatgagtttcaggggcagagtttctcctcacctcactctaggccagagtgatctccttacagaatctgtgattttcaggctggatcacagaactgttgggttctgtgggccagtgagagaaactgggggatatcaagcaggcaggcagggtctccagcctgaccagccaggtgcctgctacaaagcaacacttgatgaatagctgttgaatggatgtatgaatgaataaatgtgtcaataaatgcttcagaggccccttttatccatattggagctccaggtaggacttcattagaaaaaaagactctgtgatgtaaaagcaaagtctgagaaccacagtactggagtagaccatggtgacctcccagttaccagcagattttcagtgcagagcagatgttgggagggtggagagaagagagtgggcagggggagatgacctgaggaagctggagctatagctggcaactggatcactagacacatgggaccattgcatcattctagttcaaaagccctaaatctgtactccttgggcaccctgaatactaggtaaaactttgtgtctagacacttttttaggcagaagatacaaaattctcatcagattctcaaaggaaaccttgacctttaaaaggttacacagcattgctttaagatactatctaaacatccacagacatgggcagttgtcataaagagtctgaactttatctatttcaactcttcattttatagccaagaatatagaaagaaacggcagatgacttgcccaaggccacctggcaggtttgtgggggagagctttccaaattaagacatttaactgagtgcttgctcaaatcaggatttggatctgggatttagtatggtggtctttttaatacatcaaggattcttaatctgacgtctttggttagacttcaggatctatgaacctactgaactacatgcaaaattgggaggatatgcattttttctatggaaagaagtaggtgcttagatcagattctcaaagagatttcgggcccaattaagattagaaagcactacaatcctctaggtcagccctcagccctgccttccctgcagaacctggagaactcctgcgtagagctgctcctgttctgaactttgatcagaatgggggtgtatgtacgtgagggacagtgttctctcctgcaccatgtgtcccctcctgatgagctgataccagcacctttcccaataacagctcagagtgagaccgtgtctatggtaacagaactgggtgtgttgaacaggaaggttacagaaatttcttgacatcagccaagatgtcaaagctgagactttggacacgctcaaaacagtttccaccaagatgggctctgtcccctgggagactgagggagcaggcgagccagcaagcactgttacatgtcgtcctaatttggaaagcatagagggacattttttaaatcaatagtcagccgttctccagcaccaggagtgcaatgcagtgctcactcagagcctggaggcagctcagagattgacaggcagctgccttgtctgtcacccaacttcagtttggcagctcactgacgctgcctcttctctggctgaaataagagtgatgtggcaaccactacctttgaaactctggagagaaccaaatcccaaaaaagagaggacaggaggaaggagaggcttggcctggcacatagtgtgtacctagaaaatagataagcattttctagctcctactaaattttgggtacaacgtgggaggagtaggacatgatcagaaacactcatgcaacaaacattttgtgtttattgaataattactaagtgccagaagtagcacaggaaaccgtgtgtgtgtgtgtgcgtgtgtgcgtgtgtataggcggcgagtggggggcaatacagaattattcattcaagttatttaaaattattcattcaaattacttaaagtacctactatgtgctgggtaggcttggtgctgggcattgggtggggggagttgagtataatcactcacttatttgttgaatgtatatttactgaacatctgagtgccccacactatattagcactaatgatatagtaaaccaaatagccttgttcccatcatagtgtcaggactccctgaaaacagcatctccggatagggaaactgaggcagtagagcttcccacaaaggtctcattggtgagggcgccgggctttaacccagcatcctgacccaagctggccctgctgatgggagccacctccctctcgtcctctcacacttcctctggggcactgatgatgagtcattaataacagaattttaatggcaaaagcacagcagtacccagctctgccagtgaagcccatccccctggggctggatcaagaccgcagtgactgaacagccaaggatttttggtcccttgacaacacctttctcacgactctgccatccttccctttccacaggagaggcccttcctttttaaattggagagcttaaaaatatcctacccccaacctttggcaccccaaattgaatcagtacttagctcagtagtgactgagtgggagggagagccactcagggagggctgcatctggccttcaccacaggacgcccagtggccagactgtgaaccagccctcggccccagctatggctagaaggaagtagtcagaaaatccaaaatgaccacagaggggaggaggctggggagtggggctccacagggagggcacacggtgacatttcacgcagagggtgccccaggaaggctcaaaagcaatctgtagggaaacgggctctgggctcaattcagtgagagaaaacattgggttaaccaagttctttactggaggacttcttggaacctcaaatatgctgatgtgtattgtgaatctataaaaaggggacgtctggtgcagcatttcccaaacttatttaaccacagaaacctttttttgtttgttttttggcagagagcttagtgcactgcacagcttaaaaccctgagcttgaaacctcaggtttcctaccctgcatggggccttgcactcagtgctggggacactggaatacaaagacaaggaccctgctcccaaggagtgccatctgtggaaggtggccatgtgcagggtccaacagtggtgagccagtgtgcagggcagccctgaaaaggaggcagggagcaggcgaggagatggagctagaggacgcttgggctccccgggtgaaagagaggtgctaggaaagtatggcaggaccactaagaagttgagagagatggggtgggaagcagagagggaaacgtggacaactttcccccctcaaatcttcttgcctttgaattggccaggctggttggtctccactcagtcatgggattgtggggggtgggcggtgggctctctatccctcccagaccccactctcaaccacatctatgctattcaacttgggctaacatccagaagccagggaatagctattcacaaattcagtaactggactcattagcactgactcagaaatctttttttttcctaagtctctctcctggagaagcttttaagatcctttaaattggttagtggagagtttagagatgaggacggagcctcagctttcagctccccctgcccgtctccctggctcttcccataatactcaagggcaagagtgatgagataatccaatatctgttttattaaacacctagacatttctggcacatgtttcccaaatggggacctcaaaatctatactctccagctttaagactcctagcattcaatctacatttactctcccatgggtaggacagtcataatgctttcacataaaattgcagtatgaactgatggacaagaactctgggccaggagtcaggaggcccaggtcctcaccctggcccagcgactcataaagtcatgcaaccatgagcatcactgcctcctgggccaaagtgagcacaaaggtcctctctgtggtgaaatgcccttgcatttgtcttctaaggtaggagggcagacaccattgcctttggtctacaactgaggaaacaatatagggagtcaggtcacagcttcaaggtgacatggccaggcaagtggcagagccagacctgggtcttcacacactttcctcttcttgactgtactggcgcaggtgcttaagatttgggggaaggtgggtgggtatctggcctcttctttgggactcaaattgtgatatctctctgagaacccacaggctccctctttagggctgaggtgagaagttctgaaagtcaagcagacacatccaggcatttgggcaagaaacttcttccttccaaatcaaaggtgaaatgaaaacgattatgagcccacgggggatgaacagaggtgaatggtgggctagtctcgaggatggcctaattcagagtttcctaagtgtcagccattcatggaaccacccctgtgatttttgctacctctctggatctgtgcccacttttacgttatgtttttctttaaactgattcactatttttttttacagttagctttatcctagacagaacatctatcaaactacaggtcaatatgctaatcatatttttatattatacattaaatatataactaaatagaaaatattaatttgaataccatctaaaatcttcttgtgaaccagggatacacacatcagacattggcaaacagtagtacagatttaagtgtgagaaaacccaggcataagaaggaagaaggtaagttatttgctcaaagacaaaggctaaggtgagcaccagggtctctggacccttcagtagggtttttcataggtcactgaatgcatcctttggtgcacagaccagaaatgactgtgaatgcatccaagactcatctgtgaggctaccaagcggggggaaagatcagtcacttaccagccatgtacgtgaaattgcttgggaacctgaactcccgctggaatttctacctggaaagggttgctgatgctctatttttgttatccaacctcctgcccgctctggcccctaagaggcaccagggactatgttttatctcaccttagccaaaacctagtcttacaacactcctttccagtgggtaggggtgtgggggaatagccctgctggaggcttccaggctggctccgagatgcccacttctgcagaggaggccaaggttgcctgtgctcgaggcatgtggtaggcgtgaggttcctgctagcagggtgttcaagctgcagagggaggggctggagaaagacttcagtcctgtaactgtcaggtcgctgggccccggggctacaagaagaggtgagagcaactcttactcttgctgtatattcttggactcctactttggagccagcacttcttcaagggcttggttccccaggcattgttaactcccaaccccagtgactcatgagtgagcagggctcttagagccctagaagggtaattcaggcaaccttgggatattgtctctcctacaaaatcatcagagcagctaccatttgttcaatacctactgtgctgtcaggctgtgctaagtcccttagtgtcatctcatttcatccttatgacaacttaatgagttaggtgctaccattaccttcattttcagaggtgaagaaactgaggcactaagccatggagtccaagttcagtgatagtgggggttaaaactcaggtttgactgggcgcggtggctcacacttgtaatcccagcactttgggaggccgaggcgggtggatcgcctgaggtcaggagttcaaaaccagcctggccaacatggtgaaacccagactctactaaaaatacaaaaaattagccagggatcgtggtgggtgcctgtaatcccagctacttgagaggctgaggcaggagaatcgcttgaacccgggaggcagaggttgcagtgagccgagatcgcgctattgcactccagcctgggcaacgagagtgaaacatcatctcaaaaaaaaacaaaaaaaactcaggtttgtcttgactccaaaagctgcattcttttttttttttttttttttgaaacagaatcttgctctgtcacccaggctggagtgcaatggcgcgatctcggctcactgcaagctctgcctcccgggttcacgccattctcctgcctcagcctcccgagtagctgggaccacagggtccgcaccacgcccaactaatttttttttatatttttaatagagacggggtttcaccgtgttagccaggagggtctcgatctcctgacctggtgatctgccagtctcggcctcccaaagtgctgggattacaggcgtgagccaccgtgcccatcccaaaagctgcattcttagccaccactggggttggaaatgactaggagaccagagactactgctacctacttatctgtcacagagtactgagctcagggaatgaacctgttggcttggacttgggtctgtacctgcagcccccatggaaaagagggctcgcagcctctcctgggcggcctcatttcccagagcggctgactgctggtaacatctcaaggcctctcccagattcctctgcacaccaaggcctttctcatagcaaattccaaggtggtacctgctctgtgagtcctaaggagaaaatggacagacaaacagatacacacatgcaggaatgaggaactgacatgctaagggaggaggaagatgaagtcaggcatgctgggacttcatccacacacggtcaaggcccagtcctggcccgccccatagcaagggatctcaactacgaaatgccagaggctcagagctcacccaacacaaaggagagggggatccctccacccagggagattccagccagggcagtgtggaggcttctcttgcataggctggctgaaagcatgcacaacgaaggctacaggaaacactcaggccagttatagcaaacctgggagtcgggctcctatgttgccctgaaacagcaaggaggcgaaggtggagggttgtcttcccaaaggccctgtgccttcctgaatctctgcctgggagggctgacagaaaaggaaactcttctcctttaaaaagctatgcttggcctgggcgcggtggctcacacctgtaatcccagcactttgggagggcaaggtgggcagatcacgaggtcatgagttggagaccagtctgcccaacatagtgaaaccccgtctctaaaaatacaaaaaaaattaggcaggtgtggtggtgtgcacctgtaaccctaactactcagaaggctgaggcaggagaatcatgtgaacccgggaggcggaggttgcagtgcgctgagatcgcgccactgcactccagccagggcgacagtgtgagactccgtctcaaaaaaacaaaacaaaacaaaacaaaaaacgctatgctctttgccccagctctggatcctcgattgtctctcctctctctgagaactatgctcctgggaggaacaggatcaggtagaggctgggtgtccagctgcatagccagactgtctgcactcccatcacggctctaccacttaccagctgtgttaactcaggcacgtgactctacctcatggtgcctcagttttcttacctataaagtgggatgctaatagcacctaccttattaggttgttgcaaggattaaatacactatatgaaaagtgcttacattcactacatgaatcatattcactctcccaattaaaaaaacaaaacaaaacactattgactctcaaccatggtccaatttctcttctaccctccacagtcaaacttctgggaagagttgtctacacattctccccctgcttctataacacacaggccaaaagtctctccaacaaacatgacagactcatgcctacagaccacgttacaacacagcagtggacacacgtaaggccaaaacaccacccctgcaacactgctcagtacaaacccagaaagacacaattccctgtggggtggaagtgtgttgggtctgagtcccaatacagcgtcatatagcaggtgacagatatccttttgtacatttctcctgctagcacgctggtctgattaaagcaggccagcatgcccagtcttgccctgcacatggatgtgcagacctgcccaactttggaaggctctgtggggctctttcaaggcaaggcaggtacagcagtggatacctgttggtgacattggtccccttttgacagctactacagatactctgggcaacacagagtagacaaggaaaagcattctgatgcccaggagttcaacgaagctatcagtgtattggccagaaaacaaaggaagcagcagtcccctatgtagggagattacagttcacgcatatattgcttgatttaatccaagactcctggtccttcaagatgcaactcaaaagatatactggtcaaatacacttgaggaatacagcaaattacagatggccttttcagtgatctacagtgacataaagctttgagacttcctatattaactgtttaactcagtatttcccaaacccatctaaccatttttttcctcttatgacttacaagcatcccagagaactaatgcttcatggaacacatctgaattgtctgaatgccaatgaccccagttcacagacaaccagacatccccacccaccccaaactgagcagtgttccctgtttactgtctccacttgatgcgtcttctaatttccctgggttaccatcacttgtaatgatgtgtttttcatgtgtacaggtttcacagcactgtcacacctgttagttatctcagttagattttgatcctcacaaccaccctgtgaagtactggacaggtaaggcaagcattattattctgattttaaagacgaggaaacaggtttgaatcaagaagtgaccaggcccagtagtgtgctggtaaatgttgaacaactggctctcgaggagggaaaaagccctgttttatggcatttagcaatttctgtggtgcaaatattcccaccatagcagattttaagctgccaacagctctcacagcctggtgcaagccagctctggcgtactactgcaactgcccaacggtcacacagtaagtcagtgagcgctaaggcttgaagccaggccaaggctcctatccaacaatctcctaagcacagaagaactcagtaccagttccaaaatcccttctcttatcaggcttcatccccaacatgcttgtccactgagatcgcataccccattgttggctgcaagccaaagatatttcacagctctctgctcatccaggtagggctccttggtgaaaagcaccccgaggaaagcttgggcctgtggtcaaggaggaaggaaaagaaggcatcttggtcactttcaggctccacaggcctcagagaccttgaacagaccctgccaatggcactcacctctctcaagcctgagtctgcagcctgcttcagcaaggacactgccctctgccgctcagggttccacgaagaggctgggtctcgtagtaggcacctggcatagcggtactgagccaggctgtggccctggctggcagccaactgataataaaggaccgcctggggcaaagggagaaacacccagtcggctggcaactctgtaagcatcttttgcactcagtgaaatttttaaaaattattttaattaactaatacataataattatagactagtcagaaaattcagataagctaaaatttaaaaatataaaccaaaaatagaaacataaaatcccaagaaattcagcctcctaaagatcattcttgcttaaaattttagcgtacagccttgcaaatatcttctcacatatatgtgttagacatactcacacacataccttttagacatctacgcatttgcacgcacatatgtgtgggggggggcagagagagagagagacttagatcactctatactactttataacctatttttttaactttaatagtacaccatgaatgtctttccctgacatacagatctagcacatcattttaaggcccaaatagatgtaattaaccagttttccattgaagaaactttcaggtttttttgggtttttttgccttcacatacaactctacgaaatacattcttatatataacctctttgtgttcttatcccactttttaaaaattaattaatccattcatcaagatgctattctaggctgaggatgtagttgcaaagaagaaaggcaaaatccctgccctccctgaattttgagtctaaattcctggaagttaggagcttctttcttatttttccttcgcagctgggctagaaccaagtggagaaaagaagccaaactttcccccatccctgcccactgctcatttctagacatcaatctcagcagcccagcacagaaggcaggcttgggggcaggggaataccttgctaatgtccctgggggtgcctctgccatgctcatgacacaagcccgcattgtactgcgctttgctgtagccgcgggctgcagctttctggaagtaagaaaaggctgccgtgtggtcgccactcttcatgttctctgttcctgtaagaaggcacagggcacaaacacagcttcctcagtgaacttccccacaccctcagccaggtacctacagactcctcatctgatcctcctccctttctttttttgtgccagacactttacatatatatatatatatatatatattttttttttttttttttgagatggagtcttgctctgttgcccaggctggaatgcagtggcgcaatctcagctcactacaacctccacctcctgagttcaaacgattctcctgcctcagcctcccaagtagctgggtttacagatgcctgaccccatgcctggctaacttttgtatttttagtagagatggggtttcaccatgttggccaggcttgtctcaaactcttgatctcaggtgatccacctgcctcggcctcccaaagtgtcgggattacaggcgtgagccactgtgcctggcctttgcatatatttctatcttctaaatatttcactggtttgccatggacagcagtgggttctgccctactataaaccattcctccttctcttggtagtagcatctagatttcccattgggaacaacacctcccctagtgctgtcaatcaatgtgcttgtgttcttcctaaccacggaggttctttctcaggaatctgaaccttgatctggttgggacaaggagagaaaacagcccttgtaggtttattctgacagcagcactctgaagatactatcagctgctgcctcttaggtctctgaagcttccctgattcctgtcctttctgaggcttggcaggtcaatagatcccaatagattccttttatgtttaagttagccagagtgggtttaggttgctcataaccaacaaaccctaactgatacaagtgatactgttaatcttgtttcatgaagaaattgggagcggtaatacagcagtgtcaagacctgaatgcaggcacatccaaccccaaagtccatgctcttttcattgcccaaacaaaaaggaaacaggaaaggatgagggcacggccaattctcaactcaaggcctttgcttcaattgtctctcctgcctgggatctttctttccgcctccaccatcaaagctcccatcctgtgtctgctctaaaccttcggaccacactcaggcttaaacacttttttggcacttacttaatataccaagcctttttctacaaactaaaccgtttcaaaagtacaagtcctgtctcctcaattagactgtaaaatcctggaggcagaagcagaaaaagaatgtagaagaaataattttgcctagggtgaaggcgccatacaaatgcaaaacatgattatggcttatgctcctttcgcgttctgccaccatgccaagcgcttgctgaataaatgaatatatgaatgaagggatgggcaagtaaattctgagaagagactctttgcccatcaaaatcacataaagctcatgagggagaaaccaggttccattcagccagcagtgaattaaataaagttgcctccttgctgcctgaaaactcactgtccagggttgacagagccctctgcccttgggtagaagactcaagagtgcaaaggatcccaccatcctcctctttcccacctggctcattaatataaccagatccatctactcttcttgctctcttctttctctcatctagaccatgccactgacatgttttgttcagccgtcaccaacagcgcctgcctcgtctcctttttccccccggcaatcctacaatccatgtctgtctacatggcagccagagagatctttggaaaagtacatcagatcatgtggctgccccctttcctgctcctgcttaaagccctccaaagacttcctgtctcacttagaaaatccacactctttactgtggctcagaagacctcacctgatctgacccctgcctgcttttctggctttatctccttccgcccttcccaagatctctaagctccagccacactcacctttcttttgttcctctagcaatcaaaatccaatcctgcctcaggattttcgcgcttactgttcccgccacttggaaagctctttctccagattgaaacaaaagtggctgtctttgtgacaggtcttagatcaaaggtcttctgctcagtgaggacttctaaatcaaaaactgctccttgctcaagtcactaacacattcctttattttcttcataacatctatcaacatctgaaattctctttttgtttctcaattattgtttttctgctccctgagaataaggactttgtcttgtaaatcactgtatccccagtacctaaaacaggaactggcaaaaggtaaatgctcaacaaatttgttgtgaatgaatcccagcctcttgcctatctgcccactagaccccaatagatgctgtggggagtctgagtctccgcattagaaggcctaaaatgagccaagttactgcaaagaacagggcaaatggtggaagggtatttggagtccccacatgagggttaagaggttcctgttcacacatcgaggatctgctccaaaccccaggagcctgttctttcctaagtgtggcagagaatgctacgtgccctccaagattattttttccttcatacacagtaactagtctcctctgtggcgaggtgtggccatgtgcctatattctggacaaggatttgtgcaacgtctagattaaagggaaggagtgatcctttagcttccctaccttgccccgaccagctggctagaatacggacaggagggcaggagctggaattgccaaactgcgcctcaagatgggagccagttttaaaaatggcaggacacatctgcataagaatgggtccctgccatgccagatttggtctacctacctgggagaaaataaaatctctcgtttaagccactccctatcttgactatatctgagctaccccataccctttccattttcccaccctcctgccttggggcagggtccatttggttacccaggaagttgaaagcgatggaaacactgagctggaagagctgctgaatggaagtcacagcctcctcaagggaaagagtttttgatttatcttgttcctgggaaagaaatataaaagactcaccaagggatggtttaccaggattgccacctgcccaagagaatgttatggggatccaggtggccaaatctggataataccttttcaccagtgggctgaggctgggctggttttgcctcggactcgatgctactactggcatgcaggaagccaaaatcaccgggacctgcaagggaaaggccgacacccggccagggcaaaggagaaagttgtacttcttttctccgactctcccagtctacccaggctttccagccagcacccttgccaggaaccgaaataaccctgaatcacctcacaaggcatgggacctcacaggagtgccaattcccttcgcagcaaacaacgtccatcttgcccagctcaccaccaccgccccctgccttctgctgattccatgaggcagggacataccttcctcagaggggtcctgaggacgagctcctctcaaagagttgtgtgagaagttccggggctgagctgaggcttcttcctggccaagcctgggttccctgaggccagtgtgcctgggagctgggccatcggggctggggaggatgtgttgtcgcagtgctggaaagagccagcaagagtagtcaggtctgggccaggcgcgatggctcacacctataatcacagcaccttgggaggccgaggcgggtggatcacctgaggtcaggagttcaagaccagcctggccaacatggtgaaaccccatctgtactaaaaatacaaaaaattagcggggtgcagtggcacatgcctgtaatcccagctactcaggaggctgaggcaggaaaattgcttgaacccaggaggcggaggttgcagtgagccaagatcacaccactgcactccagcctgggtgacagagcaagactgtgtctcaaaagaaaaaaaaagagtgatcaggtcagaagaggatcagtgcaggctgctcgggcttgactgagtcctccctgaggttttagaggccataggaagaattttgaaactcctgtgacacttccttcacactcctcctcctctgtttccttggcttccctccagaggagtctagaggggcctgtatttgtgctgatctcccaccctaagcatcaatcactcctctgcctaaattcttcagtggcagggaggcatctaccttactcactgttgtagccccagtacctagcactttctttgatagcaatattgctaatgattatcatcataataaggacaagaactaatgcttaaactaataattactacacacttactatgtgtcaggcactgccctaagtccttgacatgtattaactcatttagtcctcccaagaaacctatggggtgggttttattattaccccaatttatagataaagaaaccgaggcagaaggaagttaaaagtgacttgttcagggacataagactagtatgcagcaattttgggacttgaacctctataatctgactccagagcctcaaccactaggctatgttgcttctgcaccatggcacataataggtgctcaataaagattcatttatttatgaatgactgagtgactgaccagagaataatttaactggttgaatgtgggccaggaagccacacccagaatctaaagtagtctggaccctgtgggcctcccttggttggaggtgatgggaggaaatggaaagacactgaggggcaggtgtggcccatgccctgggtggatagaacttccccacattcctcttcctctgacttcagataggaaaggcaaggagctgctgatggctcttttcctgaggtgtgtccagagacgcttcctggcccagagaaacgcccagcccagccctcctgtccccaggactgagaactcacaggagcatgggtgccacaagggagatgagaagaaacggtccaggggactgtgccaggagcagtgttctacccgctgaggtcctgctggcagggatgcctggaagtggatctgccttgccagctgcagggccagcacggccagagtgccctgggaaagacagcacgttaaggacacggtccttcaccaatcaactccatcagacccggccttattctcaaacatcacttcctcaggaaatccaggtggggcagctccccgactacaaactttcacaacaccctaacttctctggagccctgaccacactggcatttaaacaatcatctctacatttatttatctaaggtctgtctctcctgttagtctataagcacgacatgggcagggaccatgtgtgttttactcaccaatgtatctctggtgcccaagtacagcacagtgctaatatatagtagggacctaataagtacaacctgaataaatgcttgatcaagtgactaaataagcgaagactaagcaggcaaaaagataatggggtaggttggcacctagttgcaaatatagcaacaggtcagagttccccattaggctctctttccagtcttgcacaacccctccttccaccaactcccattcccccagtgaagccaccccagcacacacacatctccaggtgtaagctttgtaaaggtgtttcttctctgacaggtctgcagaagacctgagctagctcttatcccagagactccttggttttccctgtctcctgtctctccttatgttatgcttaagaaggttgacccagggtcgggtgcagtggctcatgcctgtaatcccagcacttgggaggctgaggcaggtggatcacttgaggccaggagttgaagaccagccaacatggagaaactctgttccactaaaaatacaagaattagccaggcgtggtggggcacacctgtaatcccaactactcggaggttgaggcatgaaaattgcttgaacctgggaggcagaggttgcagtgagccaggatcgcaccactgcgctccagcctaaaaaaaacacacaggttgacccagatacttacttgttgctccaggcactgcatacaatagcaagtaagacagacataatttctgccctcatgaagtttatatcttgtgtttagaaagacaaaacacaactacagagagaaatagagtaattactagtgatgttaaatgccaagaaggaaactaatcagagagttacacagagcataaaaggggtcctgacaagacaaggagtcagggaaagcctgtctgtgggggtgacgtgtgggctaaggccagaagaaaaggcaccagcattgtgaagaacagagacaagtatccatggtactgaggacagcttgcgtgcagaccctttcatatgagcagtagtgacagagcacagggatggcattgggacttctggaatccaggcccacttcctacttctcactatgggacagccctagggctcagatcttctttggcaacatgggaaaatgctcctctcttcagggtatgatatggccttagtccacagctccccatagaggggtaaccctgtcatggagacatcccaggctcagctctgctgatgacaccaatttacagatgagaaagccaagggtcacacaggtcaagtcatttgtccaaagtacacagcacgaaagcagcagggatgagctgtgacaaacatgagagtgatgtgtgtgtcaacttcattcagaagatcttataagcagaacttccacctggaacattgcctgaaaagcgaagactctgccctatgagacctagtgttcactagtaagaatctgaccttatagatcaggttcaacaaatatttttgagcaactattacgggctaggctctgtatttgatgcagcaaccaagcagtagaacatgaactccagagttaaatctggctcctccacttaacaggtatgagaccctacgcatgttacctaatatttcagagcctgagattcctcagctgtaaaatgaaggtgatatttcccttgtaagatttttgtaaggattacacaagataatgcatgtataatactttacattaataaataatgctataaggccgggcgcggtggctcacagctgtaatcccagcactttgggaggccgcggtgggtgggtcacgagatcaggagttcgagaccatcctggccaaaatggtgaaaccccgtctctactaaaaacacaaaaattatccaggcgtggtggcacgtgcctgtaatcccagctacttgggaggctgaagcaggagaattgcttgaacccgggagacggaggttgcagtgagccaagatcatgccgctgcacttcagcctgggcgacagagaaagactctgtctcagaaaaaaataataatttaaaaataaaaaaaatgaataataaaaaaaagatgcaatgtattattatttattgtaagatccatgaaggcaagaatgtatctatcttgttctctgctatgtccgtagtgactagcaaaaatgcctggcccagacaaggtgttacataaatgtttactgaattaaatgaggaaaacatacatggcgggggtgtggaaagtggcaatatctccttgaatatgctccaataccatgggttacttgttaaatggacacagtgattccctagcccttgttccaggttcggctgtatacccatgaaggatcattctcatctacactgaaggtcaaggaccaggctggggaagccttacccaagatatggcatcccatagggtgttcggggagacacgggaagacatccattggaaggcatccttccatccatgggaccttggacccccgctcgtgcctgggccatggggacctgacctagatgatgaaataagaggctatcaagtaggggcaaagggagaccagggactgggtgcggtggctcacacctgtaatcccaacaatttgggaggctgaggtgggtggatcacgaggtcaggagttcaagaccagcctggtcaagatggtgaaaccccatctctactaaaaatataaaaattggctgggtacagtggctcacactgtaatcccagcactttgggaggctgaggcgggcagatcatgagatcaggagatcaagaccatcctggctaacatggtgaaaccccgtctctactaaaaatacaaaaaaaattagccaggcgtgatggtgcatgcctgaaatcccagctacttgggaggctgaggcagcagaatcgcttgaacccaggaggcggaggtttcagtgagccaagatcgcgccactgcactccagcctgggcgacagagcgagactctgtctcaaaaaaaataaaataaaataaaaattagcagggtgtggtgacgggtgcctgtaatcccagctactcgggaggctgaggcagagaactgcttgaacctgggaggcggaggttgcagtgagctgagattgccccactgcactccagcctgggcgacagaatgagactccatctcaaaaaacaacaaaaaaaaaaaaataaaaaaaaagggtgactaggggaggaaatgagtggtaaaatggcagtatcttacctgtcgaggttaggcacaggaaccagcaaagtggaggaggtagtctgaggcccatctgggctggtggacttaggagtcaccctccagaggctaggtcccagtgtacggggaagagctgtacagaacaaccaaaactcaggcacctcaacaagaacccaggaatcactgtcatctgcctcagcagaggttcttaaacatggatacacatgggaatcttttatctactacagattctagggtagtaccccagaaccaataaactaagatttctcagggtagagcatccacgttttttaaaagcgcccatgtgattctgctggtctcctgtggatgccaaccactgttctaagatgaccaaacgttcatacatatactctcactaatgtttggggctctttgactctaaacctctcctctcttcactggctatgcctactccattggcccctaatcctctttcattcattcagtccaccatctcctgccattggactcctccccctcccaacagtcctaccaacttcttggactccaccctcttctagctaggcccatccacatctcaaattccagcagcccctgacttccccgccctctttcaagccccgccttccttggctctaacccggcccacgatcgcttcggctgtttcctcgggcccgcccccactccagttcggtctttgcggcccagagtgacgctggttgcttggacgtcccttacctcggcccaggagtcccgggaggcgccacatgtcgctgccagcaccacagagagctcgcagccgaaagcgcgagaccaacccttgggacagcggctagaaaggccgccgcgatgccccgagtggccgagtacccgaggaagc

SEQ ID NO: 2428 - DNA, 3157 bp, Homo sapiens
ctgcggagggggtccctgcttacatatccctgcacaggctcctgaggaagatgctacgagggtctggcctcccagctgtgagccgggaaaatccagttgccagtgactcctatgaggctgcggtgctctccctggccactgggctggctcactctggaactgactgctcccagctgcccaggggcttggcacctggacctgctcctccagtttgtacccctcaaaacaccccatcaccgtggagatcaatggaatcaacccaggtatgaaaacaggagagagtgcccagaacattaaagatgtaggggaaagtgggattggctgacactacacaggacattgcaggtacctaccctcaagaagattgaccccattctttttttttttgagacagagtctcactctgtcatccaggttggaatgcagtagcgcgatctcagctcatgcaacctccacctcctgggtttaagcaattctcctctctcagcctcctgtgttgctgggactacaggcacacgccaccatgcctggctaatttttgtatttttagtagagagagagtttcaccgtaaaggtaaggctggtccggaactcctgacctcaggtgatccacctgccttggcctcccaaagtgctgggattacagtcgtgagccactgggcccagctgactccattcttcatcaggtactttcaagaagatggggattgggacactgcttaaggtttagaggggatgagtctaagaagtatggatgacttgagatacacaggggagaagctgtaccactgggaggggctgggaggccccaagtggagatatactcacataggaaggaagaactgagccttctctgtgacttttgtcaggcaacaatgattgctgggtgagtaccgggctctacctcctggaaggacaaaatgcagaagtctcactgtctgaagctgctgcctctgctggcctgagggtaaggtctgaacacccacatctgccacctctcaaaaccgtagagctgtgtcattctcatccactgtctagttccagctcatggcaatgctgccaggagtacagagatggattattctgcccattttacagattttacagatgaagcagctaaatttcagggcatctaagtgagtgactgaagtgcctagtgttatcaagcaagagaagctcactgcagaatggactagaagccaaaactatgacacttgagtttttcaccaaaaaaaaaacaaaaacaaaagaaaacattttattgcaatttgattaacaaggagacaggagcccagctcaaatctgtcccattgtacttattttaaagagttattttagtagaaaaggtgtagggagtggattctgtgattagtaggtgattgatagaaagaaaaggaagggctggaaaatcctcgggcatgggcagttacctcttcatgcctcctcatgggtcccatgtgcaaactcagagggagttagtatgaaacatgcggtacaaatttaggctgtgtgtcagcaagctcattctgcacaaactctggttttatctctttatcttgacacctgaagggtgtgcataatcccatcactccccaaaatatgccctacatgcagaatttaaattcatcctgcctccttgactctgagggccacttcctaccacagctagggtcccttttctgtcagcattctttctggagcttgcttatatcaaacctaagaaaagcaactccaggactccagacaaaacagatctccacccatctggcggccagaaagggaagctctgggcaaagagggagagagaatcaacctcactcactctggatgggcctcctgtgtgttcacagaggacagagcagagtcccccagctcatcctcaatatcagcgtccccagactggcttaggtcctgctagaagaacccaggattttgcctggcagaaagacacaagacctttgccaggatcagccttgtctctcaccaattcatgtcaggtgaagacttatagtggagctgtttaaatccttagaaaaatgattttaaatgccttgaagtccaaatgactttggagtgctaaaatttcataagtttccatgcctagcacatagaaaagggaagctggggtttcatgggcatgtttgtctaataccttccatctacacaacctcacacgcacatcacaaagcatcacaaagactctaatttctccaacgcttggtggaatcacctgtccaggtacagataggctgccacaccgatgaccttaccaaggccaggaagctatctcgagcccccgtggtgactcaccaatgctggatggacaggactgagcggtcagtctcctgcctctggggcggcctcctctacgtcatcgtgcccaagggcagccaactaggccctgtgcctgtcactatcaggggagctgtgcctgccccatactacaagctgggtaagtggagtgaacatttagggaggaggaagagtggcagatgccgtgggaactgtggggtggttgctaaatgggagagggatgagctttggtggagagaaagaggaagaactgttgggagggaacatggaggcagaagatacggaataccctgtgtccatggagacttcagggcagacaaagagaagagtcaggaagccttttcttcactttacagcctatagacgcctgtgatagtagttcattattgcaatgttcttccagagttcaaatggtatttttcagctcaagggaagttggagaagtgggtgtggtaggttccatgatatttattcccaggtaagacatcgctggaggagtggaagaggcagatgcaggagaacctggctccctggggagagctggccacggacaacatcatcctgacagtgccaaccacaaaccttcaggccctgaaggaccccgagcctgtgctccgcctctgggatgagatgatgcaggctgtggccaggctggcggctgagcccttccctttccgccgtcctgagaggattgtggctgatgtgcagatctcagctggtgggtgctcccagggaatcctcctagtcagtggaaaccatgtatctattactttgccttttatgaatgtccaaaatgtgtaagcataattttattagtaaagcaagggaaaaagatataaaagac

SEQ ID NO: 2429 - DNA, 3169 bp, Homo sapiens
cctgcggagggggtccctgcttacatatccctgcacaggctcctgaggaagatgctacgagggtctggcctcccagctgtgagccgggaaaatccagttgccagtgactcctatgaggctgccgtgctctccctggccactgggctggctcactctggaactgactgctcccagctggcccaggggcttggcacctggacctgctcctccagtttgtacccctcaaaacaccccatcaccgtggagatcaatggaatcaacccaggtatgaaaacaggagagagtgcccagaacattaaagatgtaggggaaagtgggattggctgacactacacaggacattgcaggtacctaccctcaggaagattgaccccattctttttttttttttgagacagagtctcactctgtcatccaggttggaatgcagtagcgcgatctcagctcatgcaacctccacctcctgggtttaagcaattctcctctctcagcctcctgtgttgctgggactacaggcacacgccaccatgcctggctaatttttgtatttttagtagagagggagtttcaccataaaggtaaggctggtccggaactcctgacctcaggtgatccacctgccttggcctcccaaagtgctgggattacagtcgtgagccactgggcccagctgactccattcttcatcaggtactttcaagaagatggggattgggacactgcttaaggtttagaggggatgagtctaagaagtatggatgacttgagatacacaggggagaagctgtaccactgggaggggctgggaggccccaagtggagatatactcacataggaaggaagaactgagccttctctgtgacttttgtcaggcaacaatgattgctgggtgagtaccgggctctacctcctggaaggacaaaatgcagaagtctcactgtctgaagctgctgcctctgctggcctgagggtaaggtctgaacacccacatctgccacctctcaaaaccgtagagctgtgtcattctcatccactgtctagttccagctcatggcaatgctgccaggagtacagagatggattattctgcccattttacagattttacagatgaagcagctaaatttcagggcatctaagtgagtgactgaagtgcctagtgttatcaagcaagagaagctcactgcagaatggactagaagccaaaactatgacacttgagtttttcaccaaaaaaaaaaaacaaaaacaaaaacaaaagaaaacattttattgcaatttgattaacaaggagacaggagcccagctcaaatctgtcccattgtacttattttaaagagttattttagtagaaaaggtgtagggagtggattctgtgattagtaggtgattgacagaaagaaaaggaagggctggaaaatcctcgggcatgggcagttacctcttcatgcctcctcatgggtcccatgtgcaaactcagagggagttagtatgaaacatgcggtacaaatttaggctgtgtgtcagcaagctcattctgtacaaactctggttttatctctttatcttgacacctgaagggtgtgcataatcccatcactccccaaaatatgccctacatgcagaatttaaattcatcctgcctccttgactctgagggccacttcctaccacagctagggtcccttttctgtcagcattctttctggagcttgcttatatcaaacctaagaaaagcaactccaggactccagacaaaacagatctccacccatctggcggccagaaagggaagctctgggcaaagagggagagagaatcaacctcactcactctggatgggcctcctgtgtgttcacagaggacagagcagagtcccccagctcatcctcaatatcagcgtccccagactggcttaggtcctgctagaagaacccaggattttgcctggcagaaagacacaagacctttgccaggatcagcctggtctctcaccaattcatgtcaggtgaagacttatagtggagctgtttaaatccttagaaaaatgattttaaatgccttgaagtccaaatgactttggagtgctaaaatttcataagtttccatgcctagcacatagaaaagggaagctggggtttcatgggcatgtttgtctaataccttccatctacacaacctcacacgcacatcacaaagcatcacaaagactctaatttctccaacgcttggtggaatcacctgtccaggtacagattggctgccacaccgatgaccttaccaaggccaggaagctatctcgagcccccgtggtgactcaccaatgctggatggacaggactgagcggtcagtctcctgcctctggggcggcctcctctacgtcatcgtgcccaagggcagccaactaggccctgtgcctgtcactatcaggggagctgtgcctgccccatactacaagctgggtaagtggagtgaacatttagggaggaggaagagtggcagatgccgtgggaactgtggggtggttgctaaatgggagagggatgagctttggtggagagaaagaggaagaactgttgggagggaacatggaggcagaagatacggaataccctgtgtccatggagacttcagggcagacaaagagaagagtcaggaagccttttcttcactttacagcctatagacacctgtgatagtagttcattattgcaatgttcttccagagttcaaatggtatttttcagctcaagggaagttggagaagtgggtgtggtaggttccatgatatttattcccaggtaagacatcgctggaggagtggaagaggcagatgcaggagaacctggctccctggggagagctggccacggacaacatcatcctgacagtgccaaccacaaaccttcaggccctgaaggaccccgagcctgtgctccgcctctgggatgagatgatgcaggctgtggccaggctggcagctgagcccttccctttccgccgtcctgagaggattgtggctgatgtgcagatctcagctggtgggtgctcccagggaatcctcctagtcagtggaaaccatgtatctattactttgccttttatgaatgtccaaaatgtgtaagcataattttattagtaaagcaagggaaaaagatataaaagac

SEQ ID NO: 2430 - DNA, 3262 bp, Homo sapiens
ctgagccctccagagcgagagaggagaatcaaggcccacctgggaaagggagcccccctgtgtgactggaatgtatggacagccctggaaacatatctacaggtactgagcagaaattctgggagaaggggatgaccagacccctcagtcatgtagcgacctggatcccagtagctctccacctccttcgccactccaccagcctggacctccacctcccctggaaatgagagagactgggccgcagggtggtgcttcttgggttacacccctctaaggcagagagaatggcacctgtctcactcaccttctgattttgcaatgtaagaggaaatgaaaaatattatgaaaaaaatagaaatatagcatattattcaagggcagaaactctgttagacattcctgcagctgaatcacagctcttgccctcattggttttgttcttggtctcctaataagtgttccataaatggtcattgctttgtttagttttgttttatttcacctgagttttatgagtcaaatgagttatgcttttttataataacggagggtgtctgcaatgcagctgcattacaataagaaggcattgttggagacaaatctgctaacaagggtctcatcatccatcaccccacttgaagccaaaatgatttaaaatgaagagccagtcaacccaatagtagaacactgaattcataaagcaagtctacttcctgtgaaataaacacaaatccctgccccctcccctagccctgcattgaatgtcgatgttttcaagttgtcaatgttgttcccctttcagatctcctgcaatgtctcccacagctctatggataggagctgtctggcccacttttcacagaggcacacactattttaaagaatttaagcaatctttccagtagcccccatttaagtgaaggacctagaacttaaaatcaggacgtaatgacaagccccaggctttcgcattgccataccctctcttagttttttgtgcctttcactaattttctgaagagtgaatgtgagacagtcccagtcaatgaggtaactttgtattgcattcatttccatatccttagatagccagtctgggggtatacaggaccactgaccacaatggtaggttgcccctaaactgtaagtttaagccctaattctgtcctagtctgctacctactcactgtggagccccgaatatcagttctcaatagctctagagagaccaagtctgagacttggcctcaggataaacaggcaccttctgactcctcttcctgctagagggcttctccccagcatccgtgccactgctgccttagctcaggcctcgttagtcttccctcagtgtattccagtagccttctaagttgtcccagcatcttgcctcaatcctctatgatccatcttccttacactccttccaaaataatgttaatactctgtctatcaaatgcttacagtgttctctagcatatatagggtaaaatcaaagctcattagcagggcataggaggcccttcatgaccagcctcaccagcacctctagctacatctcctactgctctcacctccacatttacccttcggcatgccaacctgcttatggttacggacacagcttgctgttttggcttctgtgcctccccttgtttgcttcctgctgctgaatcatgctggaacatcttgtccattagctgtcaagtcacctgtccaaattcagctctgttggccctttctctcctggacatcgcctccttgataaaccaacagttttagcaatgtgtttatttacgtgtgtttctccctttggccagtgttctctagaaggacaagagctcttaatgatgtttgcctagcacagtagctggcggtgtgtgggtgtctaatacatgttaaacgtttaataaatgcttaatttattgatgcattgattaataagtgtcaaagagcaagccagtgagaacagatgagcaataataaggatacaacagtgagactctgaggtaggcttggcttcggtggtgttatctgtctttgggcttttatgagctacagtcacagaatgctcatctattaaagggagagtggggatgtgaaaccccagatccccgctaactggaaatttgtataatcttagtaaacaagggccttctgccaagggctttccggagagctgccccttatgaagtatgagccactctcattagctgccccttatgaagtatgagccactctcatttttagcccctcgagacaggctggatttttttctttttctgccctaaatgcagtgttctacagagcaattttgtatcattgcagatagccacaggtccaagatggctattaaaaaataaggattattatgatgtctggaaagtatagtattggaggttcgcagcttttagaatctcaataggccagatatgtaggaagtgagggtttctcatctcagtcaggcccaaacctgtcctgatgctgaggaaaacacttgagatctgggaagacaattgtttaaagatactaatagtggacatttattgagtatttacctctattcagacattaggtttcccctgagcacccccactagattcagggggtgttgttttgtggccaagaggaggaatgagccaacaagattgcattattgtgcaggggcagagtggggagataggggcacatacccaggatgaaggtaacgattgaggggaggtgatcatgtgaatgaaatatatttaagaacgcacatgtcacgtcacttttgcaaacttgacacctcattctgttccttctttcccttttcagctccaacaggccttcgggtgggagccattcacccagctctttgctgagtaccagaccctctctcacctccccaaagacaacactggcaggatgaatctatgggtgaagaagttctctgaaaaagtgaagaagaatctggttcccttctttgaggcctggggctggcctatccagaaggaggtggctgacagcctggcctccctaccagagtggcaggaaaaccccatgcaagtgtacctccgtgccaggaagtaaaggatgccccacaaggcgggagagaaaaggcagggtcacgccatcaactccaccatggggctttggccgtgtgctcagtatctggagcctgaatcccgcttccaagcctgaccactagatggtggccacggtcataagaaaaaatggaacccctttctgtaaaaggtgccttgtgcttctttttattgtt

SEQ ID NO: 2431 - DNA, 534 bp, Homo sapiens
ggtatggggaggatgtcaggcaggaccagcagcagctcctggaggggatctcagagctggacatcaggacagggggagtcccctcacagctgcttgtacatggagcctggccttccctctggggctggatgcctcactcaactgcttcctggcggctgctcactatggccggggccgggtggtcctggctgcccacgagtgcctgctctgtgctcccaagatggggcccttcttgctcaatgcggtgcgctggctggccagaggccagacaggcaaagttggggtgaacacaaatctaaaagatctgtgtcctctcctatcggagcatggcctgcaatgcagcctggagccccatctgaacagcgacttgtgtgtctactgctgcaaggcatacagtgacaaggaggctaagcagctgcaggagtttgtggctgagggtggggggctgctgattgggggccaggcctggtggtgggcctcccagaaccctggccactgccccttggctggcttccctggtaacatcatcctcaa

SEQ ID NO: 2432 - DNA, 535 bp, Homo sapiens
ggtatggggaggatgtcaggcaggaccagcagcagctcctggaggggatctcagagctggacatcaggacagggggagtcccctcacagctgcttgtacatggagccctggccttccctctggggctggatgcctcactcaactgcttcctggcggctgctcactatggctggggccgggtggtcctggctgcccacgagtgcctgctctgtgctcccaagatggggcccttcttgctcaatgcggtgcgctggctggccagaggccagacaggcaaagttggggtgaacacaaatctaaaagatctgcgtcctctcctatcggagcatggcctgcaatgcagcctggagccccatctgaacagcgacttgtgtgtctactgctgcaaggcgtacagtgacaaggaggctaagcagctgcaggagtttgtggctgagggtggggggctgctgattgggggccaggcctggtggtgggcctcccagaaccctggccactgccccttggctggcttccctggtaacatcatcctcaa

SEQ ID NO: 2433 - DNA, 3262 bp, Homo sapiens
ctgagccctccagagcgagagaggagaatcaaggcccacctgggaaagggagcccccctgtgtgactggaatgtatggacagccctggaaacatatctacaggtactgagcagaaattctgggagaaggggatgaccagacccctcagtcatgtagcgacctggatcccagtagctctccacctccttcgccactccaccagcctggacctccacctcccctggaaatgagagagactgggccgcagggtggtgcttcttgggttatacccctctaaggcagagagaatggcacctgtctcactcaccttctgattttgcaatgtaagaggaaatgaaaaatattatgaaaaaaatagaaatatagcgtattattcaagggcagaaactctgttagacattcctgcagctgaatcacagctcttgccctcattggttttgttcttggtctcctaataagtgttccataaatggtcattgctttgtttagttttgttttatttcacctgagttttatgagtcaaatgagttatgcttttttataataacggagggtgtctgcaatgcagctgcattacaataagaaggcattgttggagacaaatctgctaacaagggtctcatcatccatcaccccacttgaagccaaaatgatttaaaatgaagagccagtcaacccaatagtagaacactgaattcataaagcaagtctacttcctgtgaaataaacacaaatccctgccccctcccctagccctgcattgaatgtcgatgttttcaagttgtcaatgttgttcccctttcagatctcctgcaatgtctcccacagctctatggataggagctgtctggcccacttttcacagaggcacacactattttaaagaatttaagcaatctttccagtagcccccatttaagtgaaggacctagaacttaaaatcaggacgtaatgacaagccccaggctttcgcattgccataccctctcttagttttttgtgcctttcactaattttctgaagagtgaatgtgagacagtcccagtcaatgaggtaactttgtattgcattcatttccatatccttagatagccagtctgggggtatacaggaccactgaccacaatggtaggttgcccctaaactgtaagtttaagccctaattctgtcctagtctgctacctactcactgtggagccccgaatatcagttctcaatagctctagagagaccaagtctgagacttggcctcaggataaacaggcaccttctgactcctcttcctgctagagggcttctccccagcatccgtgccactgctgccttagctcaggcctcgttagtcttccctcagtgtattccagtagccttctaagttgtcccagcatcttgcctcaatcctctatgatccatcttccttacactccttccaaaataatgttaatactctgtctatcaaatgcttacagtgttctctagcacatatagggtaaagtcaaagctcattagcagggcataggaggcccttcatgaccagcctcgccagcacctctagctacatctcctactgctctcacctccacatttacccttcggcatgccaacctgcttatggttacggacacagcttgctgttttggcttctgtgcctccccttgtttgcttcctgctgctgaatcatgctggaacatcttgtccattagctgtcaagtcacctgtccaaattcagctctgttggccctttctctcctggacatcgcctccttgataaaccaacagttttaccaatgtgtttatttacgtgtgtttctccctttggccagtgttctctagaaggacaagagctcttaatgatgtttgcctagcacagtagctggcggtgtgtgggtgtctaatacatgttaaacgtttaataaatgcttaatttattgatgtattgattaataagtgtcaaagagcaagccagtgagaacagatgagcaataataaggatacaacagtgagactctgaggtaggcttggcttcggtggtgttatctgtccttgggcttttatgagctacagtcagagaatgctcatctattaaagggagagtggggatgtgaaaccccagatccccgctaactggaaatttgtataatcttagtaaacaagggccttctgccaagggctttccggagagctgccccttatgaagtatgagccactctcattagctgccccttatgaagtatgagccactctcatttttagcccctcgagacaggctggatttttttctttttctgccctaaatgcagtgttctacagagcaattttgtatcattgcagatagccacaggtccaagatggctattaaaaaataaggattatgatgatgtctggaaagtatagtattggaggttcgcagcttttagaatctcaataggccagatatgtaggaagtgagggtttctcatctcagtcaggcccaaacctgtcctgatgctgaggaaaacacttgagatctgggaagacaattgtttaaagatactaatagtggacatttattgagtatttacctctattcagacattaggtttcccctgagcacccccactagattcagggggtgttgttttgtggccaagaggaggaatgagccaacaagattgcattattgtgcaggggcagagtggggagataggggcacatacccaggatgaaggtaacgattgaggggaggtgatcatgtgaatgaaatatatttaagaacgcacatgtcacgtcacttttgcaaacttgacacctcattctgttccttctttcccttttcagctccaacaggccttcgggtgggagccattcacccagctctttgctgagtaccagaccctctctcacctccccaaagacaacactggcaggatgaatctatgggtgaagaagttctctgaaaaagtgaagaagaatctggttcccttctttgaggcctggggctggcctatccagaaggaggtggctgacagcctggcctccctaccagagtggcaggaaaaccccatgcaagtgtacctccgtgccaggaagtaaaggatgccccacaaggcgggagagaaaaggcagggtcacgccatcaactccaccatggggctttggccgtgtgctcagtatctggagcctgaatcccgcttccaagcctgaccactagatggtggccacggtcataagaaaaaatggaacccctttctgtaaaaggtgccttgtgcttctttttattgtt

SEQ ID NO: 2434 - DNA, 2434 bp, Homo sapiens
aatctaggtcctggttacatgagtgtgtttaatttgtgaaaatgtatatagctgtacagttatgtttacttttctgtatatatgttatacttaaataacaagttaaagaaaaataatagcaacttaaagcaaaatataactatagggagttctagcttctcatggaagatttatggtagtccacatttttagttttcagtcaaatgtaacacattttgaacactcattataggcaataattggaaagaatttaggtaattcatttcatctgctcctcaaatgaaaataatcagcttgggtgagcactcatgactataaaggtagttatacacatgtgaaaatgcagaaaagtagaaagttaaaatcaccctgaagttcgaccacttagagataaccaccacaaacactttggtgatcatccttttccagatatatttctctctgtttttgtatttatacccaaacatttgtttataagtgagtcatactagtcttgctgctgatttttatttatattgtaaaatttacataaagctgaccatcttaaccatttttaagtgtacagttcagtggcattaggtgcattcataatgttgtgcaaccatcaccactatccatctccagatctgtttactcatccatactgaaactctgtacctattaaacaataacttcctatttctctctacccccagcccctggtaaccactattctactttctgtatctaagtatttgacgattctaagtacctcatataagtagaatcaaataatttttgtctttttgtgtctggcttatttcacttaacataatgtttttaaggatcatccatgttgtagcaggtatcagaatttcattcctttttaaggctgagtaatattccgttgtctgtatataccatattttatttatatactcatctgctgatggacatttagattgtgtccaccttttggctattgtgaataatgctgctctgaagatggatgtacagatatctgttttgctttcaattcttttcagtacttttgcgtacataaacaaaagtagcattaccggatcaaataattgtatctttaattttggggggaaccatttactgttttccatggcagctgtgccattttacattcctatcatcaagagctaggctactcaaaagtaactgtatatatgagggaatgtagaagtcactgtgcgtgcccagggaatggtacaggctcataaaatagctcagaagaccttgagtttataccttgtgctgatctttactacagacaccctatgccaattttaaaaaagcaaaaaagaaaaccaaaccaaacctgatgagccctggggaatcagcatctgatctccagagttaccacattagaagattcaaacattcagttttcaacaacagtaaaatcataaggcatacaaagaaacaggaaaatatggcctactcaaagcaggaaaaagtaagtcaccagaaacttgctgagaaagactagatggtagatttgctaaacaaagacttaaagcaagtatcgatgtgcaaagaactaaaggaaaaggtggattaagttaaaaaacgaagtgtgaacaaaatggaaataatcgatggaaagctagaaaacaagaaaagaaaccccaaaattccagagctgaaaagtacaataactgaagtgaaaaccttactagaatgattcaaaagcatatttgagcaggtaaaataaagcatcagcagacttcaaaatagagcaattgaaattatcaagtctgaggaacagaaagaaaaaaaagagactgggtgcaatggctaacgcctgtaatcccaacactttgggaggctgaggcaggtgtgttgcttgaggccaggagtttgagaccagcctgggcaacacggcaaaacctcatctctacaaaaaataaaaacaaaaattagccaggtgtggtggtacatgcctgtagtcctacctacccaggaagttgaggctgtagtaagccattgatcatgccattgcactccagcatgggcaacagagcaagaccctgtctactgaaaaaaaagaaaaagaaaaaaaaatgggcagagcctaagagacctgtcagacatcatcaagtagaccaacatgcattgtggaaactttaggagaagagagagagaaaggtgcagagagattatttgaagaaataatggctaaaaacttcctagatttgatgaaagataggaatataaacatccaagaagttcagtgaactccaggtaggataaactcaagtgagatcttgccaagaaagacacattataatcaaactgtagaaagccatagacagtgagagaatcttaaaaggagcaagagagaaacatcttgtcacatacaaaggatcctcgtaagattttagaagatttctcatccgaaacattagaggccagaaagcagtgg

SEQ ID NO: 2435 - DNA, 2433 bp, Homo sapiens
aatctaggtcctggttacatgagtgtgtttaatttgtgaaaatgtatatagctgtacagttatgtttacttttctgtatatatgttatacttaaataacaagttaaagaaaaataatagcaacttaaagcaaaatataactatagggagttctagcttctcatggaagatttatggtagtccacatttttagttttcagtcaaatgtaacacattttgaacactcattataggcaataattggaaagaatttaggtaattcatttcatctgctcctcaaatgaaaataatcagcttgggtgagcactcatgactataaaggtagttatacacatgtgaaaatgcagaaaagtagaaagttaaaatcaccctgaagttcgaccacttagagataaccaccacaaacactttggtgatcatccttttccagatatatttctctctgtttttgtatttatacccaaacatttgtttataagtgagtcatactagtcttgctgctgatttttatttatattgtaaaatttacataaagctgaccatcttaaccatttttaagtgtacagttcagtggcattaggtgcattcataatgttgtgcaaccatcaccactatccatctccagatctgtttcctcatccatactgaaactctgtacctattaaacaataacttcctatttctctctacccccagcccctggtaaccactattctactttctgtatctaagtatttgacgattctaagtacctcatataagtagaatcaaataatttttgtctttttgtgtctggcttatttcacttaacataatgtttttaaggatcatccatgttgtagcaggtatcagaatttcattcctttttaaggctgagtaatattccgttgtctgtatataccatattttatttatatactcatctgctgatggacatttagattgtgtccaccttttggctattgtgaataatgctgctctgaagatggatgtacagatatctgttttgctttcaattcttttcagtacttttgcgtacataaacaaaagtagcattactggatcaaataattgtatctttaattttggggggaaccatttactgttttccatggcagctgtgccattttacattcctatcatcaagagctaggctactcaaaagtaactgtatatatgagggaatgtagaagtcactgtgcgtgcccagggaatggtacaggctcataaaatagctcagaagaccttgagtttataccttgtgctgatctttactacagacaccctatgccaattttaaaaaagcaaaaaagaaaaccaaaccaaacctgatgagccctggggaatcagcatctgatctccagagttaccacattagaagattcaaacattcagttttcaacaacagtaaaatcataaggcatacaaagaaacaggaaaatatggcctactcaaagcaggaaaaagtaagtcaccagaaacttgctgagaaagactagatggtagatttgctaaacaaagacttaaagcaagtatcgatgtgcaaagaactaaaggaaaaggtggattaagttaaaaaacgaagtgtgaacaaaatggaaataatcgatggaaagctagaaaacaagaaaagaaaccccaaaattccagagctgaaaagtacaataactgaagtgaaaaccttactagaatgattcaaaagcatatttgagcaggtaaaataaagcatcagcagacttcaaaatagagcaattgaaattatcaagtctgaggaacagaaagaaaaaaaagagactgggtgcaatggctaacgcctgtaatcccaacactttgggaggctgaggcaggtgtgttgcttgaggccaggagtttgagaccagcctgggcaacacggcaaaacctcatctctacaaaaaataaaaacaaaaattagccaggtgtggtggtacatgcctgtagtcctacctacccaggaagttgaggctgtagtaagccatgatcatgccattgcactccagcatgggcaacagagcaagaccctgtctactgaaaaaaaagaaaaagaaaaaaaaatgggcagagcctaagagacctgtcagacatcatcaagtagaccaacatgcattgtggaaactttaggagaagagagagagaaaggtgcagagagattatttgaagaaataatggctaaaaacttcctagatttgatgaaagataggaatataaacatccaagaagttcagtgaactccaggtaggataaactcaagtgagatcttgccaagaaagacacattataatcaaactgtagaaagccatagacagtgagagaatcttaaaaggagcaagagagaaacatcttgtcacatacaaaggatcctcgtaagattttagaagatttctcatccgaaacattagaggccagaaagcagtgg

SEQ ID NO: 2436 - DNA, 2433 bp, Homo sapiens; identical to SEQ ID NO: 2435

SEQ ID NO: 2437 - DNA, 803 bp, Homo sapiens
aggtagattcatggacaattagaaaggtttaggccgggcgtggtggctcacgcctgtaatcccagcactttgggaggccgaggcgggcggatcacgaggtcaggagatcgagaccatcccggctaaaacggtgaaaccccgtctctactaaaaatacaaaaaaaaattagccgggcgtagtggcgggcgcctggtagtcccagctacttgggaggctgaggcaggagaatggcgtgaacccgggaggcggagcttgcagtgagccgagatcccgccactgcactccagcctgggcgacagagcgagactccgtctcaaaaaaaaaaaaaaaaaaagaaaggtttataactctactttttgtattctacatgatttaagagacatgaataagaaataaaaggtagtctgtttttggacacatagtgcctaaatgtaacattgtgacatcagtaactgaactggggtagagacagagttttatgagagcatagttttcttactgcttttgaaattaagctcatgcaggctgggcgcagtggcttatacctgtaatccctgcactttgggaggccaaggtgggcggatcacctaaggccaggagttcgagaccagactgaccaacatggtgaaacccagtttctactaaaaatacaaaaattagctgggcgtgtggtgcgcgcctgtaatagcaactactgtggaggctgaggcaggagaatcgcttgaacctgggggccggaggttgcagtgagctgagatcatgatgccacttgcactctagcctgagtgataaagtgagactc

SEQ ID NO: 2438 - DNA, 465 bp, Homo sapiens
aaaaaaacaacaacacagagcttctagtatcaagtgagctaatgtgtataatttgagtctcaggagaagaggggtcaggaaggatcatatgaaattgtagctgaatgtttttcaaacatgatgaaaactattaagcttgcagatccaaggaactcatctccaaattgaataaacacaaaaccatacaaaggcaaagcataatcaaattactgaaaaccaaaaagattactgaaaaccgaaaagataaccccccaaaaagacaaatttaggtccaataaacagtgataagaatgattttaaaattcttattagaaacgatgcaaactagaatatctttcatatggtgagaaaaaccccacaaaacaaccctatgttatcctagacttaagtccaatgaaaataacattcataggtgaaggtgaaataaagatattttcaaacaaaagccagaaagaatttgttgcc

SEQ ID NO: 2439 - DNA, 2119 bp, Homo sapiens
agaaaggtttaggccgggcgtggtggctcacgcctgtaatcccagcactttgggaggccgaggcgggcggatcacgaggtcaggagatcgagaccatcccggctaaaacggtgaaaccccgtctctactaaaaatacaaaaaaaaattagccgggcgtagtggcgggcgcctgtagtcccagctacttgggaggctgaggcaggagaatggcgtgaacccgggaggcggagcttgcagtgagccgagatcccgccactgcactccagcctgggcgacagagcgagactccgtctcaaaaaaaaaaaaaaaaaaagaaaggtttataactctactttttgtattctacatgatttaagagacatgaataagaaataaaaggtagtctgtttttggacacatagtgcctaaatgtaacattgtgacatcagtaactgaactggggtagagacagagttttatgagagcatagttttcttactgcttttgaaattaagctcatgcaggctgggcgcagtggcttatacctgtaatccctgcactttgggaggccaaggtgggcggatcacctaaggccaggagttcgagaccagactgaccaacatggtgaaacccagtttctactaaaaatacaaaaattagctgggcgtgtggtgcgcgcctgtaatagcaactactgtggaggctgaggcaggagaatcgcttgaacctgggggccggaggttgcagtgagctgagatcatgatgccactgcactctagcctgagtgataaagtgagactcaaaaagagaagctcatgcagattcacattagagtgttataagtttaggatgttaagcataatcctcatggtatccacaaagaaaatggctgtacaaaaggaaataagaagggaataaaaacatttcattaaccaaaaaaatcaagtaaacacacaagaaaacattaatgcaggaaataagggacaaaatagctatgccatacagaaaataaatggcaagttggcagaagaaaatttgtccttatcaataattccttttttttttttttttttggagatagggtcttgctctgtcacccaggctggagtgcagcgtcgtgacacagctcacagcagcctcgacctcctgggctctagcaatcctcccatctcagcctgccaagtacctgggactatagatgcatgccactgcaccagctaatttttatattttttgtagagacagggtttcatcatgttgcctaggctagtctggaactcctggactcaagcaatcctcctgccttggcctcccaaagtgctaggattacaggcatgagccactgtgcccagcccacagtaattactttgaatgtaaatggatttaaagtctctaatcaaattggcagaatggattttacaaaacataatattatatttaaaaacatatatactgtctacaagagtgagactttagatccaaaaacacaaatagattggaagcaaaaggatggaaaaagatattttgtggacatagtaaataaaagacagcagggacagctatgttattatcagataaaatagattttaaataaagattatatgagacaaaggacattatatattaattaaagattaaatacagcaagaagataatacaagtgtacatatttttgtatacagtaacagactgtcaaaacatatgcagcaaaagtggacagaattgaagacagaaatagttcttccataatagttagataatactgcactgtcaacaatgggtatatcaactagataggaattaggtaggaaaacaggggacttgaagaacgaaggcagagtgcagtggctcacacctgtaatcctagcactttgggaggccgaggcagttggatcacctgatgtcaggagtttgagaccagcctggccaacttggcaaaaccctgtctctactaacaatacaaaaattgctgggtgtcatggtgtgtgcctgtaatcccaggtacgggaggctgaggtaggagaattgcttgaacctgggaggtggaggttgcagtgagccgagattgtgccaccacagtccagcctgggagacaggtccatctcaaaaaaaaaaaaaaaaaaaaaaaaaagaaataaa

SEQ ID NO: 2440 - DNA, 2142 bp, Homo sapiens
aggtagattcatggacaattagaaaggtttaggccgggcgtggtggctcacgcctgtaatcccagcactttgggaggccgaggcgggcggatcacgaggtcaggagatcgagaccatcccggctaaaacggtgaaaccccgtctctactaaaaatacaaaaaaaaattagccgggcgtagtggcgggcgcctgtagtcccagctacttgggaggctgaggcaggagaatggcgtgaacccgggaggcggagcgttgcagtgagccgagatcccgccactgcactccagcctgggcgacagagcgagactccgtctcaaaaaaaaaaaaaaaaaaagaaaggtttataactctactttttgtattctacatgatttaagagacatgaataagaaataaaaggtagtctgtttttggacacatagtgcctaaatgtaacattgtgacatcagtaactgaactggggtagagacagagttttatgagagcatagttttcttactgcttttgaaattaagctcatgcaggctgggcgcagtggcttatacctgtaatccctgcactttgggaggccaaggtgggcggatcacctaaggccaggagttcgagaccagactgaccaacatggtgaaacccagtttctactaaaaatacaaaaattagctgggcgtgtggtgcgcgcctgtaatagcaactactgtggaggctgaggcaggagaatcgcttgaacctgggggccggaggttgcagtgagctgagatcatgatgccactgcactctagcctgagtgataaagtgagactcaaaaagagaagctcatgcagattcacattagagtgttataagtttaggatgttaagcataatcctcatggtatccacaaagaaaatggctgtacaaaaggaaataagaagggaataaaaacatttcattaaccaaaaaaatcaagtaaacacacaagaaaacattaatgcaggaaataagggacaaaatagctatgccatacagaaaataaatggcaagttggcagaagaaaatttgtccttatcaataattccttttttttttttttttttggagatagggtcttgctctgtcacccaggctggagtgcagcgtcgtgacacagctcacagcagcctcgacctcctgggctctagcaatcctcccatctcagcctgccaagtacctgggactatagatgcatgccactgcaccagctaatttttatattttttgtagagacagggtttcatcatgttgcctaggctagtctggaactcctggactcaagcaatcctcctgccttggcctcccaaagtgctaggattacaggcatgagccactgtgcccagcccacagtaattactttgaatgtaaatggatttaaagtctctaatcaaattggcagaatggattttacaaaacataatattatatttaaaaacatatatactgtctacaagagtgagactttagatccaaaaacacaaatagattggaagcaaaaggatggaaaaagatattttgtggacatagtaaataaaagacagcagggacagctatgttattatcagataaaatagattttaaataaagattatatgagacaaaggacattatatattaattaaagattaaatacagcaagaagataatacaagtgtacatatttttgtatacagtaacagactgtcaaaacatatgcagcaaaagtggacagaattgaagacagaaatagttcttccataatagttagataatactgcactgtcaacaatgggtatatcaactagataggaattaggtaggaaaacaggggacttgaagaacgaaggcagagtgcagtggctcacacctgtaatcctagcactttgggaggccgaggcagttggatcacctgatgtcaggagtttgagaccagcctggccaacttggcaaaaccctgtctctactaaaaatacaaaaattgctgggtgtcatggtgtgtgcctgtaatcccaggtacgggaggctgaggtaggagaattgcttgaacctgggaggtggaggttgcagtgagccgagattgtgccaccacagtccagcctgggagacaggctccatctcaaaaaaaaaaaaaaaaaaaaaaaaaagaaataaag

SEQ ID NO: 2441 - DNA, 465 bp, Homo sapiens; identical to SEQ ID NO: 2438

SEQ ID NO: 2442 - DNA, 1711 bp, Homo sapiens
ctggagttcagtggtgccgtcactgcagcctcaacctcccaggctcaagggatcctccccttcagcgtccctagtagctgggactacaggtgcgctccaccacacccagctagtttttgaatttttttgtagtgatggggtttcactatgttgcccacgctggtctcaaactcctgggctcaagccatctgcctaccttagcctcataaagtgctggaattgcaggtgtgagccactgcacctggccaagaacttggtgtttcttatttccaagcttatctcctctgttatttgctcccagggagaccccttttccatttatgtttccagggtgctggggggaagtgattgccctcatctcttttgcccagccaccaaacccagtgcagactctgctgaatgcaggccccatctctgtattttacttattccatttcctgtcttgaaggtgggggcactatgtttatctctaggaccctgactggctcatcattgaaagcttattttgtgcaaagcattgttctgagcactgtgtgtgtatgattctacttcatcctctgtaaccctagcagtccggtcaaatagtatcattttatagacaaggcaactgaggcacagagcagctcagcagcttgcccagatcacacagctggaaagtggtagagctggaatctggatgggtgctggcagcctggcctcagagtcggtgctaaccactgagcggcactgccacccaacggatgggagcctgcaggatgaggccatgggaattgatttcactcagcgcgagccaagcagaactcccgtccagacctctgtccaccaccctaataaagccagtgtttacacaggctggaggtgctcatcagatgtttttgccaatccccaaatacggccagggccagaaagtgagaggggtgcctattatgtaaggccctgcggctggtccccagacaatgccacttcctcgcttggcgctgtgtgactgcataacaacgggttactcatttcctctggaaaacttcacagggcctctttgccccatttcctcctcccaccccatcctcaggcttcctctgttgaattttctccagattcctgggaacaccaccatggagggcctggcctttggcggtggacagtctgtggctgggtgggaacgtcaggagtggggcctgcctctttgctgggaatgccgtgcactcccagcccacttgccccatgccagcactcgaggcaggtgaggcccagccatgggtataaggtgctcccagggcgggattagcctcaaggaggcagggggtccatgtttctgctcctctcccattactaacgggtgtctgctttaggtttgatctccctcccttctgcccctctcctggtaaagggatgaataatgaaggccttccttgggaagtctgagatggattaccccaaggaggctcgaacatgggaggacatgcgagaactattgtcacatgagttttctttctatcctgtctgcaggacttcgcaggtgagcagtaacggaaatcagccccgtttattcctcccagcacctgccttatccaactccccacgctgtggctgagtcccagcctgctatggaagcatcactggactcccattgaactctgtgcagattcgctgttcgtagacatggtacctgatggacaccaagctacgtacagcttcaaggcccctctttctt
